(19) United States
(12) Patent Application Publication
(10) Pub. No.: US 2023/0017979 A1
(43) Pub. Date: Jan. 19, 2023

(54) COMPOSITIONS AND METHODS FOR NON-TOXIC CONDITIONING

(71) Applicant: Beam Therapeutics Inc., Cambridge, MA (US)

(72) Inventors: Adam HARTIGAN, Cambridge, MA (US); Tanggis BOHNUUD, Cambridge, MA (US)

(73) Assignee: Beam Therapeutics Inc., Cambridge, MA (US)

(21) Appl. No.: 17/638,683

(22) PCT Filed: Aug. 28, 2020
(86) PCT No.: PCT/US2020/048586

§ 371 Date: Feb. 25, 2022

Related U.S. Application Data
(60) Provisional application No. 62/893,677, filed on Aug. 29, 2019.

(51) Int. Cl. C12N 9/78; C12N 15/11; C12N 9/22; C12N 15/90; A61K 39/395; A61K 38/17; A61K 35/17

(52) U.S. Cl. CPC C12N 9/78; C12N 15/11; C12N 15/111; C12N 9/22; C12N 15/907; A61K 39/3955; A61K 38/1774; A61K 35/17; C12N 2310/20; C12N 2800/80

(57) ABSTRACT

The invention features compositions and methods for conditioning a patient (e.g., to facilitate transplantation and/or engraftment). The invention provides a base editing strategy targeting cell surface proteins that is useful for conditioning. In one aspect, the invention provides methods of producing a hematopoietic stem cell or progenitor thereof for the treatment of a hemoglobinopathy, hematologic cancer, or myeloproliferative disease.

### CROSS REFERENCE TO RELATED APPLICATIONS

[0001] The present application claims priority to U.S. App. No. 62/893,677 filed Aug. 29, 2019, the entire contents of which are hereby incorporated by reference in its entirety.

### BACKGROUND OF THE INVENTION

[0002] Gene therapy using autologous hematopoietic stem cell (HSCs) is desirable because it is not generally associated with the requirement to suppress the immune system and carries reduced risk of host vs graft or graft vs host disease. However, ensuring engraftment of hematopoietic stem cell transplants in a host remains challenging. Conditioning (depletion of HSCs) prior to hematopoietic stem cell transplantation (HSCT) is used to promote engraftment. Indeed, conditioning efficacy is associated with improved engraftment. One disadvantage of myeloablative (toxic) conditioning is that it can lead to increasing levels of chimerism.

[0003] Current methods for conditioning for autologous gene therapy for the treatment of, for example, β-thalassemia, sickle cell disease (SCD), or adenosine deaminase deficiency, typically involve the use of intravenous busulfan between 2-5 mg/kg for 2-4 days. Busulfan is a DNA alkylating drug originally designed to treat hematologic diseases, such as acute myeloid leukemia (AML). However, busulfan carries the risk of significant side effects, including sterility, primary or secondary malignancy, and additional acute and chronic toxicities

[0004] Conditioning prior to HSCT is an unmet medical need. Thus, compositions and methods for conditioning to promote the engraftment of hematopoietic stem cell transplants are urgently required.

### SUMMARY OF THE INVENTION

[0005] As described below, the present invention features compositions and methods for non-toxic conditioning.

[0006] In one aspect, the invention provides methods of producing a hematopoietic stem cell or progenitor thereof for the treatment of a hemoglobinopathy, hematologic cancer, or myeloproliferative disease. In some embodiments, the method includes (a) expressing in the hematopoietic stem cell or progenitor thereof a nucleobase editor polypeptide, wherein the nucleobase editor polypeptide comprises a nucleic acid programmable DNA binding protein (napDNAbp) and a deaminase; and (b) contacting the hematopoietic stem cell or progenitor thereof with a guide RNA that targets a nucleic acid molecule encoding a cell surface protein selected from the group of CD117, CXCR4, CD135, CD90, CD45, and CD34, and introducing a mutation in the cell surface protein.

[0007] In some embodiments, the method includes (a) expressing in a hematopoietic stem cell or progenitor thereof comprising a CD117 protein a nucleobase editor polypeptide, wherein the nucleobase editor polypeptide comprises a nucleic acid programmable DNA binding protein (napDNAbp) and a deaminase; (b) contacting the hematopoietic stem cell or progenitor with a guide RNA capable of targeting a polynucleotide encoding the cell surface protein, thereby producing a hematopoietic stem cell or progenitor thereof for the treatment of a hemoglobinopathy, hematologic cancer, or myeloproliferative disease.

[0008] In some embodiments, the hemoglobinopathy is selected from the group of sickle cell anemia, thalassemia, Fanconi anemia, aplastic anemia, and Wiskott-Aldrich syndrome. In some embodiments, the hematologic cancer is selected from the group of acute myeloid leukemia, acute lymphoid leukemia, chronic myeloid leukemia, chronic lymphoid leukemia, multiple myeloma, diffuse large B-cell lymphoma, and non-Hodgkin's lymphoma. In some embodiments, the myeloproliferative disease is a myelodysplastic syndrome. In one aspect, the invention provides methods of producing a stem cell or progenitor thereof for the treatment of an immune deficiency. In some embodiments, the immune deficiency is severe combined immune deficiency (SCID).

[0009] In another aspect, the invention provides methods of identifying a mutation that alters antibody binding to a cell surface protein. In some embodiments, the method includes (a) expressing in a cell comprising a cell surface protein a nucleobase editor polypeptide, wherein the nucleobase editor polypeptide comprises a nucleic acid programmable DNA binding protein (napDNAbp) and a deaminase; (b) contacting the cell with a guide RNA capable of targeting a nucleic acid molecule encoding the cell surface protein and introducing a mutation in the cell surface protein; and (c) contacting the cell with an antibody that specifically binds a wild-type cell surface protein, but that exhibits reduced binding to the cell surface protein comprising the mutation, thereby identifying a mutation that alters antibody binding to the cell surface protein.

[0010] In some embodiments, the method further includes assaying a biological activity of the cell. In some embodiments, the cell surface protein is selected from the group of CD117, CXCR4, CD135, CD90, CD45, and CD34. In some embodiments, the cell surface protein is CD117. In some embodiments, the method further includes contacting the cell with one or more additional guide RNAs that target a cell surface protein selected from the group of CXCR4, CD135, CD90, CD45, and CD34. In some embodiments, the cell is a hematopoietic stem cell or a progenitor thereof. In some embodiments, the mutation is a missense mutation. In some embodiments, the missense mutation fails to alter the biological activity of the cell surface protein. In some embodiments, one or more amino acid substitutions are introduced by the nucleobase editor polypeptide and the guide RNAs.

[0011] In some embodiments, the method includes (a) expressing in a hematopoietic stem cell or progenitor thereof a nucleobase editor polypeptide, wherein the nucleobase editor polypeptide comprises a nucleic acid programmable DNA binding protein (napDNAbp) and a deaminase; (b) contacting the cell with a guide RNA capable of targeting a nucleic acid molecule encoding a cell surface protein selected from the group of CD117, CXCR4, CD135, CD90, CD45, CD34, and introducing a mutation in the cell surface protein; and (c) contacting the cell with an antibody that specifically binds a wild-type cell surface protein, but that exhibits reduced binding to the cell surface protein comprising a mutation, thereby identifying a mutation that alters antibody binding to the cell surface protein.

[0012] In yet another aspect, the invention provides methods of base editing a gene encoding a cell surface protein expressed by a hematopoietic stem cell or a progenitor thereof. In some embodiments, the method includes (a) expressing in a hematopoietic stem cell or a progenitor thereof comprising a CD117 protein a nucleobase editor polypeptide, wherein the nucleobase editor polypeptide comprises a nucleic acid programmable DNA binding protein (napDNAbp) and a deaminase; and (b) contacting the cell with a guide RNA capable of targeting a nucleic acid molecule encoding the CD117 protein, thereby base editing the gene encoding the cell surface protein.

[0013] In one aspect, the invention provides methods of conditioning a subject concurrent with or subsequent to a hematopoietic stem cell transplant (HSCT). In some embodiments, the method includes (a) expressing in an isolated hematopoietic stem cell of the subject or of a donor a nucleobase editor polypeptide comprising a nucleic acid programmable DNA binding protein (napDNAbp) and a deaminase; (b) contacting the hematopoietic stem cell with a guide RNA capable of targeting a nucleic acid molecule encoding a cell surface protein selected from the group of CD117, CXCR4, CD135, CD90, CD45, and CD34, thereby introducing a mutation in the cell surface protein and generating an edited hematopoietic stem cell; (c) administering the edited hematopoietic stem cell to the subject; and (d) administering to the subject an antibody, antibody drug conjugate, or chimeric antigen receptor expressing T cell (CAR-T) that selectively binds a wild-type version of the cell surface protein, wherein the administering of step (d) is concurrent with or subsequent to step (c).

[0014] In some embodiments, the method includes (a) expressing in a hematopoietic stem cell of the subject a nucleobase editor polypeptide comprising a nucleic acid programmable DNA binding protein (napDNAbp) and a deaminase; (b) contacting the hematopoietic stem cell with a guide RNA capable of targeting a nucleic acid molecule encoding a CD117 protein, thereby introducing a mutation in the CD117 protein and generating an edited hematopoietic stem cell; (c) administering the edited hematopoietic stem cell to the subject; and (d) administering to the subject an antibody, antibody drug conjugate, or chimeric antigen receptor expressing T cell (CAR-T) that selectively binds a wild-type version of CD117, wherein the administering of step (d) is concurrent with or subsequent to step (c).

[0015] In some embodiments, the deaminase domain is an adenosine deaminase or a cytidine deaminase. In some embodiments, the adenosine deaminase domain is a TadA deaminase domain. In some embodiments, the adenosine deaminase a TadA*8 variant. In some embodiments, the adenosine deaminase is TadA*8.1, TadA*8.2, TadA*8.3, TadA*8.4, TadA*8.5, TadA*8.6, TadA*8.7, TadA*8.8, TadA*8.9, TadA*8.10, TadA*8.11, TadA*8.12, TadA*8.13, TadA*8.14, TadA*8.15, TadA*8.16, TadA*8.17, TadA*8.18, TadA*8.19, TadA*8.20, TadA*8.21, TadA*8.22, TadA*8.23, or TadA*8.24. In some embodiments, the deaminase is a monomer or heterodimer. In some embodiments, the nucleobase editor polypeptide is an ABE8 base editor. In some embodiments, the ABE8 base editor is ABE8.1-m, ABE8.2-m, ABE8.3-m, ABE8.4-m, ABE8.5-m, ABE8.6-m, ABE8.7-m, ABE8.8-m, ABE8.9-m, ABE8.10-m, ABE8.11-m, ABE8.12-m, ABE8.13-m, ABE8.14-m, ABE8.15-m, ABE8.16-m, ABE8.17-m, ABE8.18-m, ABE8.19-m, ABE8.20-m, ABE8.21-m, ABE8.22-m, ABE8.23-m, ABE8.24-m, ABE8.1-d, ABE8.2-d, ABE8.3-d, ABE8.4-d, ABE8.5-d, ABE8.6-d, ABE8.7-d, ABE8.8-d, ABE8.9-d, ABE8.10-d, ABE8.11-d, ABE8.12-d, ABE8.13-d, ABE8.14-d, ABE8.15-d, ABE8.16-d, ABE8.17-d, ABE8.18-d, ABE8.19-d, ABE8.20-d, ABE8.21-d, ABE8.22-d, ABE8.23-d, or ABE8.24-d. In some embodiments, the nucleobase editor polypeptide is an internal base editor (IBE) comprising the deaminase domain inserted at an internal location of the napDNAbp. In some embodiments, the nucleobase editor polypeptide further comprises one or more uracil glycosylase inhibitors (UGIs). In some embodiments, the nucleobase editor polypeptide further comprises one or more nuclear localization sequences (NLS).

[0016] In some embodiments, the mutation is a missense mutation. In some embodiments, the missense mutation fails to alter the biological activity of the cell surface protein. In some embodiments, the CD117 cell surface protein comprising the mutation is capable of binding Stem Cell Factor (SCF). In some embodiments, the CD117 cell surface protein comprising the mutation is capable of SCF signaling. In some embodiments, the mutation is at least one amino acid substitution resulting from the modification of one or more single target nucleobases. In some embodiments, the single target nucleobase is a cytosine (C) and wherein the modification comprises conversion of the C to a thymine (T). In some embodiments, the single target nucleobase is an adenosine (A) and wherein the modification comprises conversion of the A to a guanine (G). In some embodiments, the at least one amino acid substitution is a naturally occurring mutation. In some embodiments, the at least one amino acid substitution is in domain 1, 2, 3, 4, or 5 of CD117. In some embodiments, the at least one amino acid substitution in CD117 is selected from the group of: T13A, 535P, I39V, H40R, K43G, K43R, S44P, D45G, I47V, D52G, E53G, I54V, R55G, L56P, L57P, T59A, F63P, V64A, K65E, K65R, W66R, T67A, D72G, E73G, T74A, N75D, N75G, E76G, N77G, N77S, N77Y, K78E, K78R, Q79R, N80G, N80S, E81G, E81D, W82R, I83T, I83V, T84A, E85G, K86E, E88G, T90A, N99G, K100G, H101R, K116R, V120A, S123P, L124P, Y125H, K127G, K127R, E128G, D129G, D129E, N130G, N130D, D131G, D131N, T132A, T144A, N145D, N145G, N145Y, N145S, Y146C, K149E, K149G, Q152R, K154E, K154G, R161G, F162P, F162L, I163T, I163V, D165G, M171T, I172T, I172V, K173G, S174G, K176G, Q190R, E191G, K193G, V195A, L196P, S197P, E198G, K199G, F200P, I201T, I201V, L202P, V213A, V214A, S215P, V216A, K218G, K218R, 5220G, Y221C, E225G, E227G, E228G, T230A, S240G, Y243C, K247G, R248G, Q256R, E257G, E257D, K258E, K258G, Y259C, Y259H, N260G, D266G, N268D, N268G, Y269C, T276A, I277T, I277V, S279P, R281G, V282A, 5285P, N293G, N294G, T295A, F296P, S298P, N300G, N300S, T302A, T303A, T304A, M318V, T322A, V323A, F324L, N326G, D327G, D332G, I334V, K342E, K342G, K342R, Q347R, Y350H, M351T, R353G, T354A, T354I, K358G, E360G, D361G, K364G, E366G, N367G, H378R, T380A, R381G, K383G, T385A, T389A, D398G, V399A, N400G, V407A, Y408H, E414G, I415V, T417A, Y418C, Y418H, D419G, R420G, L421P, V422A, N423S, M425V, E435G, I438M, D439G, V454A, L455P, V457A, V459A, Q460R, T461A, N463G, S464P, 5465P, F469P, K471E, K471G, L472P, V473A, Q475R, S476G, I478M, I478V, D479G, S481G, F483P, K484G, N486G, N486S, T488A, Y494C, N495D, D496G, K499E, Y503C, Y503H, F504P, and N505G. In some embodiments, the at least one amino acid substitution in CD117 is selected from the group of: T13A, I39V, H40R, D45G, D52G, E53G, I54V, R55G, T59A, K65E, K65R, T67A, E76G, N77G, N77S, N77Y, K78E, Q79R, N80G, E81G, E81D, N99G, K100G, H101R, L124P, Y125H, D129E, D129G, N130D, N130G, D131G, D131N, T132A, T144A, N145D, N145G, N145Y, N145S, Y146C, F162P, F162L, I163T, I163V, M171T, I172T, V195A, L196P, K199G, I201V, S220G, Y221C, Q256R, E257D, E257G, K258E, Y259C, T303A, T304A, M318V, T322A, V323A, F324L, K342G, K342R, Y350H, M351T, R353G, T354A, T354I, R381G, K383G, T385A, Y418C, D419G, R420G, I438M, D439G, Q460R, T461A, K484G, N486G, and T488A. In some embodiments, the at least one amino acid substitution in CD117 is a naturally occurring mutation selected from the group of: T13A, N77S, D129E, N130D, D131N, T144A, Y221C, E257D, T322A, T354I, D419G.

[0017] In some embodiments, the is a hematopoietic stem cell, a common myeloid progenitor, proerythroblast, or erythroblast. In some embodiments, the cell is a CD34+ cell. In some embodiments, the cell is from a subject having hemoglobinopathy, hematologic cancer, or a myeloproliferative disease. In some embodiments, the cell is from a subject having sickle cell disease (SCD). In some embodiments, the cell is from a subject having hereditary persistence of fetal hemoglobin (HPFH). In some embodiments, the cell is from a subject having severe combined immune deficiency (SCID). In some embodiments, the cell is a mammalian cell. In some embodiments, the cell is a human cell.

[0018] In some embodiments, the deaminase domain is fused to the napDNAbp. In some embodiments, the deaminase domain is inserted at an internal location of the napDNAbp. In some embodiments, the napDNAbp is a nuclease inactive or nickase variant. In some embodiments, the napDNAbp comprises a Cas9, Cas12a/Cpf1, Cas12b/C2c1, Cas12c/C2c3, Cas12d/CasY, Cas12e/CasX, Cas12g, Cas12h, Cas12i, or Cas12j/CasΦ polynucleotide or a portion thereof. In some embodiments, the napDNAbp comprises a Cas9 polynucleotide or a portion thereof. In some embodiments, the napDNAbp comprises a dead Cas9 (dCas9) or a Cas9 nickase (nCas9). In some embodiments, the napDNAbp is a modified Staphylococcus aureus Cas9 (SaCas9), Streptococcus thermophilus 1 Cas9 (St1Cas9), a modified Streptococcus pyogenes Cas9 (SpCas9), or variants thereof. In some embodiments, the napDNAbp comprises a variant of SpCas9 having an altered protospacer-adjacent motif (PAM) specificity. In some embodiments, the altered PAM has specificity for the nucleic acid sequence 5′-NGC-3′.

[0019] In some embodiments, the deaminase domain is capable of deaminating cytidine or adenine in DNA. In some embodiments, the deaminase domain is a cytidine deaminase domain. In some embodiments, the cytidine deaminase is an APOBEC deaminase domain or a derivative thereof. In some embodiments, the deaminase domain is an adenosine deaminase domain. In some embodiments, the adenosine deaminase domain is TadA deaminase domain. In some embodiments, the adenosine deaminase is a TadA*8 variant. In some embodiments, the adenosine deaminase is TadA*8.1, TadA*8.2, TadA*8.3, TadA*8.4, TadA*8.5, TadA*8.6, TadA*8.7, TadA*8.8, TadA*8.9, TadA*8.10, TadA*8.11, TadA*8.12, TadA*8.13, TadA*8.14, TadA*8.15, TadA*8.16, TadA*8.17, TadA*8.18, TadA*8.19, TadA*8.20, TadA*8.21, TadA*8.22, TadA*8.23, or TadA*8.24. In some embodiments, the deaminase is a monomer or a heterodimer. In some embodiments, the guide polynucleotide comprises a nucleic acid sequence comprising at least 10 contiguous nucleotides that are complementary to a CD117 nucleic acid sequence. In some embodiments, the one or more guide polynucleotides comprises a nucleic acid sequence selected from Table 23. In some embodiments, the one or more guide polynucleotides comprise a nucleic acid sequence that hybridizes to the complement of a CD117 target sequence selected from the group of:

CAAGCTATCTTCTTAGGGA;
GCAAGCTATCTTCTTAGGGAA;
ACTTACGACAGGCTCGTGAA;
TGACCAATTATTCCCTCAAG;
AGTGACCAATTATTCCCTCA;
ACTACAGTATTTGTAAACGA;
AAGACAACGACACGCTGGTC;
and
GGCTGTTATGCACTGATCCG.

In some embodiments, the guide RNAs target the following scaffold nucleic acid sequence:

GTTTTAGAGCTAGAAATAGCAAGTTAAAATAAGGCTAGTCCGTTATCAA
CTTGAAAAAGTGGCACCGAGTCGGTGC.

[0020] In some embodiments, the antibody is an anti-CD117 antibody. In some embodiments, the antibody binds domain 1, 2, 3, 4, or 5 of CD117. In some embodiments, the antibody is a monoclonal antibody. In some embodiments, the hemoglobinopathy is sickle cell disease (SCD). In some embodiments, the hemoglobinopathy is hereditary persistence of fetal hemoglobin (HPFH). In some embodiments, the sickle cell disease is associated with a mutation in a beta globin (HBB) polynucleotide. In some embodiments, the HPFH is associated with a mutation in a Hemoglobin Subunit Gamma 1 (HBG1) and/or Hemoglobin Subunit Gamma 2 (HBG2) polynucleotide.

[0021] In another aspect, the invention provides a base editor system including a fusion protein or a polynucleotide encoding the fusion protein, wherein the fusion protein comprises a nucleic acid programmable DNA binding protein (napDNAbp) and a deaminase domain, and a guide polynucleotide comprising a nucleic acid sequence selected from Table 23.

[0022] In yet another aspect, the invention provides a base editor system including a fusion protein or a polynucleotide encoding the fusion protein, wherein the fusion protein comprises a nucleic acid programmable DNA binding protein (napDNAbp) and a deaminase domain, and a guide polynucleotide comprising a nucleic acid sequence that hybridizes to the complement of a target nucleic acid sequence selected from the group of:

CAAGCTATCTTCTTAGGGA;
GCAAGCTATCTTCTTAGGGAA;
ACTTACGACAGGCTCGTGAA;
TGACCAATTATTCCCTCAAG;
AGTGACCAATTATTCCCTCA;
ACTACAGTATTTGTAAACGA;
AAGACAACGACACGCTGGTC;
and
GGCTGTTATGCACTGATCCG.

In some embodiments, the fusion protein further comprises one or more uracil glycosylase inhibitors (UGIs). In some embodiments, the fusion protein further comprises one or more nuclear localization sequences (NLS).

[0023] In some embodiments, the base editor system is capable of modifying one or more single target nucleobases to effect at least one amino acid substitution in a CD117 polypeptide. In some embodiments, the single target nucleobase is a cytosine (C) and wherein the modification comprises conversion of the C to a thymine (T). In some embodiments, the single target nucleobase is an adenosine (A) and wherein the modification comprises conversion of the A to a guanine (G). In some embodiments, the at least one amino acid substitution is a naturally occurring mutation. In some embodiments, the at least one amino acid substitution is in domain 1, 2, 3, 4, or 5 of CD117. In some embodiments, the at least one amino acid substitution is selected from the group consisting of: T13A, S35P, I39V, H40R, K43G, K43R, S44P, D45G, I47V, D52G, E53G, I54V, R55G, L56P, L57P, T59A, F63P, V64A, K65E, K65R, W66R, T67A, D72G, E73G, T74A, N75D, N75G, E76G, N77G, N77S, N77Y, K78E, K78R, Q79R, N80G, N80S, E81G, E81D, W82R, I83T, I83V, T84A, E85G, K86E, E88G, T90A, N99G, K100G, H101R, K116R, V120A, S123P, L124P, Y125H, K127G, K127R, E128G, D129G, D129E, N130G, N130D, D131G, D131N, T132A, T144A, N145D, N145G, N145Y, N145S, Y146C, K149E, K149G, Q152R, K154E, K154G, R161G, F162P, F162L, I163T, I163V, D165G, M171T, I172T, I172V, K173G, S174G, K176G, Q190R, E191G, K193G, V195A, L196P, S197P, E198G, K199G, F200P, I201T, I201V, L202P, V213A, V214A, S215P, V216A, K218G, K218R, S220G, Y221C, E225G, E227G, E228G, T230A, S240G, Y243C, K247G, R248G, Q256R, E257G, E257D, K258E, K258G, Y259C, Y259H, N260G, D266G, N268D, N268G, Y269C, T276A, I277T, I277V, S279P, R281G, V282A, S285P, N293G, N294G, T295A, F296P, S298P, N300G, N300S, T302A, T303A, T304A, M318V, T322A, V323A, F324L, N326G, D327G, D332G, I334V, K342E, K342G, K342R, Q347R, Y350H, M351T, R353G, T354A, T354I, K358G, E360G, D361G, K364G, E366G, N367G, H378R, T380A, R381G, K383G, T385A, T389A, D398G, V399A, N400G, V407A, Y408H, E414G, I415V, T417A, Y418C, Y418H, D419G, R420G, L421P, V422A, N423S, M425V, E435G, I438M, D439G, V454A, L455P, V457A, V459A, Q460R, T461A, N463G, S464P, S465P, F469P, K471E, K471G, L472P, V473A, Q475R, S476G, I478M, I478V, D479G, S481G, F483P, K484G, N486G, N486S, T488A, Y494C, N495D, D496G, K499E, Y503C, Y503H, F504P, and N505G. In some embodiments, the at least one amino acid substitution in CD117 is selected from the group of: T13A, I39V, H40R, D45G, D52G, E53G, I54V, R55G, T59A, K65E, K65R, T67A, E76G, N77G, N77S, N77Y, K78E, Q79R, N80G, E81G, E81D, N99G, K100G, H101R, L124P, Y125H, D129E, D129G, N130D, N130G, D131G, D131N, T132A, T144A, N145D, N145G, N145Y, N145S, Y146C, F162P, F162L, I163T, I163V, M171T, I172T, V195A, L196P, K199G, I201V, S220G, Y221C, Q256R, E257D, E257G, K258E, Y259C, T303A, T304A, M318V, T322A, V323A, F324L, K342G, K342R, Y350H, M351T, R353G, T354A, T354I, R381G, K383G, T385A, Y418C, D419G, R420G, I438M, D439G, Q460R, T461A, K484G, N486G, and T488A. In some embodiments, the at least one amino acid substitution is a naturally occurring mutation selected from the group consisting of: T13A, N77S, D129E, N130D, D131N, T144A, Y221C, E257D, T322A, T354I, D419G

[0024] In some embodiments, the napDNAbp is a nuclease inactive or nickase variant. In some embodiments, the napDNAbp comprises a Cas9, Cas12a/Cpf1, Cas12b/C2c1, Cas12c/C2c3, Cas12d/CasY, Cas12e/CasX, Cas12g, Cas12h, Cas12i, or Cas12j/Cas0 polynucleotide or a portion thereof. In some embodiments, the napDNAbp comprises a Cas9 polynucleotide or a portion thereof. In some embodiments, the napDNAbp comprises a dead Cas9 (dCas9) or a Cas9 nickase (nCas9). In some embodiments, the napDNAbp is a modified Staphylococcus aureus Cas9 (SaCas9), Streptococcus thermophilus 1 Cas9 (St1Cas9), a modified Streptococcus pyogenes Cas9 (SpCas9), or variants thereof. In some embodiments, the napDNAbp comprises a variant of SpCas9 having an altered protospacer-adjacent motif (PAM) specificity. In some embodiments, the altered PAM has specificity for the nucleic acid sequence 5′-NGC-3′. In some embodiments, the deaminase domain is capable of deaminating cytidine or adenine in DNA. In some embodiments, the deaminase domain is a cytidine deaminase domain. In some embodiments, the cytidine deaminase is an APOBEC deaminase or a derivative thereof. In some embodiments, the deaminase domain is an adenosine deaminase domain. In some embodiments, the adenosine deaminase domain is a TadA deaminase domain. In some embodiments, the adenosine deaminase is a TadA*8 variant. In some embodiments, the adenosine deaminase is TadA*8.1, TadA*8.2, TadA*8.3, TadA*8.4, TadA*8.5, TadA*8.6, TadA*8.7, TadA*8.8, TadA*8.9, TadA*8.10, TadA*8.11, TadA*8.12, TadA*8.13, TadA*8.14, TadA*8.15, TadA*8.16, TadA*8.17, TadA*8.18, TadA*8.19, TadA*8.20, TadA*8.21, TadA*8.22, TadA*8.23, or TadA*8.24. In some embodiments, the deaminase is a monomer or heterodimer.

[0025] In one aspect, the invention provides a polynucleotide encoding any of the base editor systems as provided herein. In another aspect, the invention provides a cell produced by any of the methods as provided herein. In yet another aspect, the invention provides a cell produced by introducing into a cell, or a progenitor thereof, any of the base editor systems or any of the polynucleotides as provided herein. In some embodiments, the cell is produced ex vivo or in vitro. In some embodiments, the cell is a hematopoietic stem cell, a common myeloid progenitor, proerythroblast, or erythroblast. In some embodiments, the cell is a CD34⁺ cell. In some embodiments, the cell is a mammalian cell. In some embodiments, the cell is a human cell.

[0026] In one aspect, the invention provides an isolated cell or population of cells propagated or expanded from any of the cells as provided herein.

[0027] In yet another aspect, the invention provides pharmaceutical compositions including an effective amount of any of the cells as provided herein.

[0028] In another aspect, the invention provides methods of treating a subject with a hemoglobinopathy, hematologic cancer, or myeloproliferative disease. In some embodiments, the method includes administering to the subject any of the pharmaceutical compositions as provided herein. In some embodiments, the method includes administering to the subject a conditioning regimen comprising an antibody, antibody drug conjugate or chimeric antigen receptor expressing T-cell that selectively binds a cell surface protein and any of the cells as provided herein, thereby treating the hemoglobinopathy, hematologic cancer, or myeloproliferative disease. In some embodiments, the cell surface protein is CD117 antibody. In some embodiments, the antibody, antibody drug conjugate or chimeric antigen receptor expressing T-cell selectively binds domain 1, 2, 3, 4, or 5 of CD117. In some embodiments, the antibody is a monoclonal antibody. In some embodiments, the antibody is administered sequentially or concurrently. In some embodiments, the hemoglobinopathy is sickle cell disease or hereditary persistence of fetal hemoglobin (HPFH). In another aspect, the invention provides methods of treating a subject with an immune deficiency. In some embodiments, the immune deficiency is severe combined immune deficiency (SCID).

[0029] In some embodiments, the cell is autologous to the subject. In some embodiments, the cell is allogenic to the subject. In some embodiments, the subject is a mammal. In some embodiments, the mammal is a human.

[0030] In one aspect, the invention provides a kit comprising any of the cells as provided herein, any of the base editor systems as provided herein, any of the polynucleotides as provided herein, or any of the pharmaceutical compositions as provided herein. In some embodiments, the kit includes written instructions for the use of the kit in the treatment of a hemoglobinopathy, hematologic cancer, myeloproliferative disease, or immune deficiency.

[0031] The description and examples herein illustrate embodiments of the present disclosure in detail. Any compositions or methods provided herein can be combined with one or more of any of the other compositions and methods provided herein. It is to be understood that this disclosure is not limited to the particular embodiments described herein and as such can vary. Those of skill in the art will recognize that there are numerous variations and modifications of this disclosure, which are encompassed within its scope.

[0032] The practice of some embodiments disclosed herein employ, unless otherwise indicated, conventional techniques of immunology, biochemistry, chemistry, molecular biology, microbiology, cell biology, genomics and recombinant DNA, which are within the skill of the art. See for example Sambrook and Green, Molecular Cloning: A Laboratory Manual, 4th Edition (2012); the series Current Protocols in Molecular Biology (F. M. Ausubel, et al. eds.); the series Methods In Enzymology (Academic Press, Inc.), PCR 2: A Practical Approach (M. J. MacPherson, B. D. Hames and G. R. Taylor eds. (1995)), Harlow and Lane, eds. (1988) Antibodies, A Laboratory Manual, and Culture of Animal Cells: A Manual of Basic Technique and Specialized Applications, 6th Edition (R. I. Freshney, ed. (2010)).

[0033] The section headings used herein are for organizational purposes only and are not to be construed as limiting the subject matter described.

[0034] Although various features of the present disclosure can be described in the context of a single embodiment, the features can also be provided separately or in any suitable combination. Conversely, although the present disclosure can be described herein in the context of separate embodiments for clarity, the present disclosure can also be implemented in a single embodiment. The section headings used herein are for organizational purposes only and are not to be construed as limiting the subject matter described.

[0035] The features of the present disclosure are set forth with particularity in the appended claims. A better understanding of the features and advantages of the present will be obtained by reference to the following detailed description that sets forth illustrative embodiments, in which the principles of the disclosure are utilized, and in view of the accompanying drawings as described hereinbelow.

### Definitions

[0036] The following definitions supplement those in the art and are directed to the current application and are not to be imputed to any related or unrelated case, e.g., to any commonly owned patent or application. Although any methods and materials similar or equivalent to those described herein can be used in the practice for testing of the present disclosure, the preferred materials and methods are described herein. Accordingly, the terminology used herein is for the purpose of describing particular embodiments only, and is not intended to be limiting.

[0037] Unless defined otherwise, all technical and scientific terms used herein have the meaning commonly understood by a person skilled in the art to which this invention belongs. The following references provide one of skill with a general definition of many of the terms used in this invention: Singleton et al., Dictionary of Microbiology and Molecular Biology (2nd ed. 1994); The Cambridge Dictionary of Science and Technology (Walker ed., 1988); The Glossary of Genetics, 5th Ed., R. Rieger et al. (eds.), Springer Verlag (1991); and Hale & Marham, The Harper Collins Dictionary of Biology (1991). As used herein, the following terms have the meanings ascribed to them below, unless specified otherwise.

[0038] In this application, the use of the singular includes the plural unless specifically stated otherwise. It must be noted that, as used in the specification, the singular forms “a,” “an” and “the” include plural referents unless the context clearly dictates otherwise. In this application, the use of “or” means “and/or” unless stated otherwise. Furthermore, use of the term “including” as well as other forms, such as “include”, “includes,” and “included,” is not limiting.

[0039] As used in this specification and claim(s), the words “comprising” (and any form of comprising, such as “comprise” and “comprises”), “having” (and any form of having, such as “have” and “has”), “including” (and any form of including, such as “includes” and “include”) or “containing” (and any form of containing, such as “contains” and “contain”) are inclusive or open-ended and do not exclude additional, unrecited elements or method steps. It is contemplated that any embodiment discussed in this specification can be implemented with respect to any method or composition of the present disclosure, and vice versa. Furthermore, compositions of the present disclosure can be used to achieve methods of the present disclosure.

[0040] The term “about” or “approximately” means within an acceptable error range for the particular value as determined by one of ordinary skill in the art, which will depend in part on how the value is measured or determined, i.e., the limitations of the measurement system. For example, “about” can mean within 1 or more than 1 standard deviation, per the practice in the art. Alternatively, “about” can mean a range of up to 20%, up to 10%, up to 5%, or up to 1% of a given value. Alternatively, particularly with respect to biological systems or processes, the term can mean within an order of magnitude, e.g., within 5-fold, within 2-fold of a value. Where particular values are described in the application and claims, unless otherwise stated, the term “about” means within an acceptable error range for the particular value should be assumed.

[0041] Reference in the specification to “some embodiments,” “an embodiment,” “one embodiment” or “other embodiments” means that a particular feature, structure, or characteristic described in connection with the embodiments is included in at least some embodiments, but not necessarily all embodiments, of the present disclosures.

[0042] By “adenosine deaminase” is meant a polypeptide or fragment thereof capable of catalyzing the hydrolytic deamination of adenine or adenosine. In some embodiments, the deaminase or deaminase domain is an adenosine deaminase catalyzing the hydrolytic deamination of adenosine to inosine or deoxy adenosine to deoxyinosine. In some embodiments, the adenosine deaminase catalyzes the hydrolytic deamination of adenine or adenosine in deoxyribonucleic acid (DNA). The adenosine deaminases (e.g., engineered adenosine deaminases, evolved adenosine deaminases) provided herein may be from any organism, such as a bacterium.

[0043] In some embodiments, the deaminase or deaminase domain is a variant of a naturally-occurring deaminase from an organism, such as a human, chimpanzee, gorilla, monkey, cow, dog, rat, or mouse. In some embodiments, the deaminase or deaminase domain does not occur in nature. For example, in some embodiments, the deaminase or deaminase domain is at least 50%, at least 55%, at least 60%, at least 65%, at least 70%, at least 75% at least 80%, at least 85%, at least 90%, at least 95%, at least 96%, at least 97%, at least 98%, at least 99%, or at least 99.5% identical to a naturally-occurring deaminase. In some embodiments, the adenosine deaminase is from a bacterium, such as, E. coli, S. aureus, S. typhi, S. putrefaciens, H. influenzae, or C. crescentus. In some embodiments, the adenosine deaminase is a TadA deaminase. In some embodiments, the TadA deaminase is an E. coli TadA (ecTadA) deaminase or a fragment thereof.

[0044] For example, deaminase domains are described in International PCT Application Nos. PCT/2017/045381 (WO 2018/027078) and PCT/US2016/058344 (WO 2017/070632), each of which is incorporated herein by reference for its entirety. Also, see Komor, A. C., et al., “Programmable editing of a target base in genomic DNA without double-stranded DNA cleavage” Nature 533, 420-424 (2016); Gaudelli, N. M., et al., “Programmable base editing of A•T to G•C in genomic DNA without DNA cleavage” Nature 551, 464-471 (2017); Komor, A. C., et al., “Improved base excision repair inhibition and bacteriophage Mu Gam protein yields C:G-to-T:A base editors with higher efficiency and product purity” Science Advances 3:eaao4774 (2017)), and Rees, H. A., et al., “Base editing: precision chemistry on the genome and transcriptome of living cells.” Nat Rev Genet. 2018 December; 19(12):770-788. doi: 10.1038/s41576-018-0059-1, the entire contents of which are hereby incorporated by reference.

[0045] A wild type TadA(wt) adenosine deaminase has the following sequence (also termed TadA reference sequence):

MSEVEFSHEYWMRHALTLAKRAWDEREVPVGAVLVHNNRVIGEGW
NRPIGRHDPTAHAEIMALRQGGLVMQNYRLIDATLYVTLEPCVMC
AGAMIHSRIGRVVFGARDAKTGAAGSLMDVLHHPGMNHRVEITEG
ILADECAALLSDFFRMRRQEIKAQKKAQSSTD.

[0046] In some embodiments, the adenosine deaminase comprises an alteration in the following sequence:

MSEVEFSHEYWMRHALTLAKRARDEREVPVGAVLVLNNRVIGEGW
NRAIGLHDPTAHAEIMALRQGGLVMQNYRLIDATLYVTFEPCVMC
AGAMIHSRIGRVVFGVRNAKTGAAGSLMDVLHYPGMNHRVEITEG
ILADECAALLCYFFRMPRQVFNAQKKAQSSTD

(also termed TadA*7.10).

[0047] In some embodiments, TadA*7.10 comprises at least one alteration. In some embodiments, TadA*7.10 comprises an alteration at amino acid 82 and/or 166. In particular embodiments, a variant of the above-referenced sequence comprises one or more of the following alterations: Y147T, Y147R, Q154S, Y123H, V82S, T166R, and/or Q154R. The alteration Y123H refers to the alteration H123Y in TadA*7.10 reverted back to Y123H TadA(wt). In other embodiments, a variant of the TadA*7.10 sequence comprises a combination of alterations selected from the group of: Y147T+Q154R; Y147T+Q154S; Y147R+Q154S; V82S+Q154S; V82S+Y147R; V82S+Q154R; V82S+Y123H; I76Y+V82S; V82S+Y123H+Y147T; V82S+Y123H+Y147R; V82S+Y123H+Q154R; Y147R+Q154R+Y123H; Y147R+Q154R+I76Y; Y147R+Q154R+T166R; Y123H+Y147R+Q154R+I76Y; V82S+Y123H+Y147R+Q154R; and I76Y+V82S+Y123H+Y147R+Q154R.

[0048] In other embodiments, the invention provides adenosine deaminase variants that include deletions, e.g., TadA*8, comprising a deletion of the C-terminus beginning at residue 149, 150, 151, 152, 153, 154, 155, 156, or 157, relative to TadA*7.10, the TadA reference sequence, or a corresponding mutation in another TadA. In other embodiments, the adenosine deaminase variant is a TadA (e.g., TadA*8) monomer comprising one or more of the following alterations: Y147T, Y147R, Q154S, Y123H, V82S, T166R, and/or Q154R, relative to TadA*7.10, the TadA reference sequence, or a corresponding mutation in another TadA. In other embodiments, the adenosine deaminase variant is a TadA (e.g., TadA*8) monomer comprising the following alterations: Y147T+Q154R; Y147T+Q154S; Y147R+Q154S; V82S+Q154S; V82S+Y147R; V82S+Q154R; V82S+Y123H; I76Y+V82S; V82S+Y123H+Y147T; V82S+Y123H+Y147R; V82S+Y123H+Q154R; Y147R+Q154R+Y123H; Y147R+Q154R+I76Y; Y147R+Q154R+T166R; Y123H+Y147R+Q154R+I76Y; V82S+Y123H+Y147R+Q154R; and I76Y+V82S+Y123H+Y147R+Q154R, relative to TadA*7.10, the TadA reference sequence, or a corresponding mutation in another TadA.

[0049] In still other embodiments, the adenosine deaminase variant is a homodimer comprising two adenosine deaminase domains each having one or more of the following alterations Y147T, Y147R, Q154S, Y123H, V82S, T166R, and/or Q154R relative to TadA*7.10, the TadA reference sequence, or a corresponding mutation in another TadA. In other embodiments, the adenosine deaminase variant is a homodimer comprising two adenosine deaminase domains (e.g., TadA*8) each having a combination of alterations selected from the group of: Y147T+Q154R; Y147T+Q154S; Y147R+Q154S; V82S+Q154S; V82S+Y147R; V82S+Q154R; V82S+Y123H; I76Y+V82S; V82S+Y123H+Y147T; V82S+Y123H+Y147R; V82S+Y123H+Q154R; Y147R+Q154R+Y123H; Y147R+Q154R+I76Y; Y147R+Q154R+T166R; Y123H+Y147R+Q154R+I76Y; V82S+Y123H+Y147R+Q154R; and I76Y+V82S+Y123H+Y147R+Q154R, relative to TadA*7.10, the TadA reference sequence, or a corresponding mutation in another TadA.

[0050] In other embodiments, the adenosine deaminase variant is a heterodimer comprising a wild-type TadA adenosine deaminase domain and an adenosine deaminase variant domain (e.g., TadA*8) comprising one or more of the following alterations Y147T, Y147R, Q154S, Y123H, V82S, T166R, and/or Q154R, relative to TadA*7.10, the TadA reference sequence, or a corresponding mutation in another TadA. In other embodiments, the adenosine deaminase variant is a heterodimer comprising a wild-type TadA adenosine deaminase domain and an adenosine deaminase variant domain (e.g. TadA*8) comprising a combination of alterations selected from the group of: Y147T+Q154R; Y147T+Q154S; Y147R+Q154S; V82S+Q154S; V82S+Y147R; V82S+Q154R; V82S+Y123H; I76Y+V82S; V82S+Y123H+Y147T; V82S+Y123H+Y147R; V82S+Y123H+Q154R; Y147R+Q154R+Y123H; Y147R+Q154R+I76Y; Y147R+Q154R+T166R; Y123H+Y147R+Q154R+I76Y; V82S+Y123H+Y147R+Q154R; and I76Y+V82S+Y123H+Y147R+Q154R, relative to TadA*7.10, the TadA reference sequence, or a corresponding mutation in another TadA.

[0051] In other embodiments, the adenosine deaminase variant is a heterodimer comprising a TadA*7.10 domain and an adenosine deaminase variant domain (e.g., TadA*8) comprising one or more of the following alterations Y147T, Y147R, Q154S, Y123H, V82S, T166R, and/or Q154R, relative to TadA*7.10, the TadA reference sequence, or a corresponding mutation in another TadA. In other embodiments, the adenosine deaminase variant is a heterodimer comprising a TadA*7.10 domain and an adenosine deaminase variant domain (e.g. TadA*8) comprising a combination of the following alterations: Y147T+Q154R; Y147T+Q154S; Y147R+Q154S; V82S+Q154S; V82S+Y147R; V82S+Q154R; V82S+Y123H; I76Y+V82S; V82S+Y123H+Y147T; V82S+Y123H+Y147R; V82S+Y123H+Q154R; Y147R+Q154R+Y123H; Y147R+Q154R+I76Y; Y147R+Q154R+T166R; Y123H+Y147R+Q154R+I76Y; V82S+Y123H+Y147R+Q154R; or I76Y+V82S+Y123H+Y147R+Q154R, relative to TadA*7.10, the TadA reference sequence, or a corresponding mutation in another TadA. In one embodiment, the adenosine deaminase is a TadA*8 that comprises or consists essentially of the following sequence or a fragment thereof having adenosine deaminase activity:

MSEVEFSHEYWMRHALTLAKRARDEREVPVGAVLVLNNRVIGEGW
NRAIGLHDPTAHAEIMALRQGGLVMQNYRLIDATLYVTFEPCVMC
AGAMIHSRIGRVVFGVRNAKTGAAGSLMDVLHYPGMNHRVEITEG
ILADECAALLCTFFRMPRQVFNAQKKAQSSTD.

[0052] In some embodiments, the TadA*8 is truncated. In some embodiments, the truncated TadA*8 is missing 1, 2, 3, 4, 5, 6, 7, 8, 9, 10, 11, 12, 13, 14, 15, 6, 17, 18, 19, or 20 N-terminal amino acid residues relative to the full length TadA*8. In some embodiments, the truncated TadA*8 is missing 1, 2, 3, 4, 5, 6, 7, 8, 9, 10, 11, 12, 13, 14, 15, 6, 17, 18, 19, or 20 C-terminal amino acid residues relative to the full length TadA*8. In some embodiments the adenosine deaminase variant is a full-length TadA*8.

[0053] In particular embodiments, an adenosine deaminase heterodimer comprises an TadA*8 domain and an adenosine deaminase domain selected from one of the following: Staphylococcus aureus (S. aureus) TadA:

MGSHMTNDIYFMTLAIEEAKKAAQLGEVPIGAIITKDDEVIARAH
NLRETLQQPTAHAEHIAIERAAKVLGSWRLEGCTLYVTLEPCVMC
AGTIVMSRIPRVVYGADDPKGGCSGSLMNLLQQSNFNHRAIVDKG
VLKEACSTLLTTFFKNLRANKKSTN

Bacillus subtilis (B. subtilis) TadA:

MTQDELYMKEAIKEAKKAEEKGEVPIGAVLVINGEIIARAHNLRE
TEQRSIAHAEMLVIDEACKALGTWRLEGATLYVTLEPCPMCAGAV
VLSRVEKVVFGAFDPKGGCSGTLMNLLQEERFNHQAEVVSGVLEE
ECGGMLSAFFRELRKKKKAARKNLSE

Salmonella typhimurium (S. typhimurium) TadA:

MPPAFITGVTSLSDVELDHEYWMRHALTLAKRAWDEREVPVGAVL
VHNHRVIGEGWNRPIGRHDPTAHAEIMALRQGGLVLQNYRLLDTT
LYVTLEPCVMCAGAMVHSRIGRVVFGARDAKTGAAGSLIDVLHHP
GMNHRVEIIEGVLRDECATLLSDFFRMRRQEIKALKKADRAEGAG
PAV

Shewanella putrefaciens (S. putrefaciens) TadA:

MDEYWMQVAMQMAEKAEAAGEVPVGAVLVKDGQQIATGYNLSISQ
HDPTAHAEILCLRSAGKKLENYRLLDATLYITLEPCAMCAGAMVH
SRIARVVYGARDEKTGAAGTVVNLLQHPAFNHQVEVTSGVLAEAC
SAQLSRFFKRRRDEKKALKLAQRAQQGIE

Haemophilus influenzae F3031 (H. influenzae) TadA:

MDAAKVRSEEDEKMMRYALELADKAEALGEIPVGAVLVDDARNIIGEGWN
LSIVQSDPTAHAEIIALRNGAKNIQNYRLLNSTLYVTLEPCTMCAGAILH
SRIKRLVFGASDYKTGAIGSRFHFFDDYKMNHTLEITSGVLAEECSQKLS
TFFQKRREEKKIEKALLKSLSDK

Caulobacter crescentus (C. crescentus) TadA:

MRTDESEDQDHRMMRLALDAARAAAEAGETPVGAVILDPSTGEVIATAGN
GPIAAHDPTAHAEIAAMRAAAAKLGNYRLTDLTLVVTLEPCAMCAGAISH
ARIGRVVFGADDPKGGAVVHGPKFFAQPTCHWRPEVTGGVLADESADLLR
GFFRARRKAKI

Geobacter sulfurreducens (G. sulfurreducens) TadA:

MSSLKKTPIRDDAYWMGKAIREAAKAAARDEVPIGAVIVRDGAVIGRGHN
LREGSNDPSAHAEMIAIRQAARRSANWRLTGATLYVTLEPCLMCMGAIIL
ARLERVVFGCYDPKGGAAGSLYDLSADPRLNHQVRLSPGVCQEECGTMLS
DFFRDLRRRKKAKATPALFIDERKVPPEP

### TadA*7.10

MSEVEFSHEYWMRHALTLAKRARDEREVPVGAVLVLNNRVIGEGWNRAIG
LHDPTAHAEIMALRQGGLVMQNYRLIDATLYVTFEPCVMCAGAMIHSRIG
RVVFGVRNAKTGAAGSLMDVLHYPGMNHRVEITEGILADECAALLCYFFR
MPRQVFNAQKKAQSSTD.

[0055] By “Adenosine Deaminase Base Editor 8 (ABE8) polypeptide” or “ABE8” is meant a base editor as defined herein comprising an adenosine deaminase variant comprising an alteration at amino acid position 82 and/or 166 of the following reference sequence:

MSEVEFSHEYWMRHALTLAKRARDEREVPVGAVLVLNNRVIGEGWNRAIG
LHDPTAHAEIMALRQGGLVMQNYRLIDATLYVTFEPCVMCAGAMIHSRIG
RWFGVRNAKTGAAGSLMDVLHYPGMNHRVEITEGILADECAALLCYFFRM
PRQVFNAQKKAQSSTD

[0056] In some embodiments, ABE8 comprises further alterations, as described herein, relative to the reference sequence.

[0057] By “Adenosine Deaminase Base Editor 8 (ABE8) polynucleotide” is meant a polynucleotide encoding an ABE8.

[0058] “Administering” is referred to herein as providing one or more compositions described herein to a patient or a subject. By way of example and without limitation, composition administration, e.g., injection, can be performed by intravenous (i.v.) injection, sub-cutaneous (s.c.) injection, intradermal (i.d.) injection, intraperitoneal (i.p.) injection, or intramuscular (i.m.) injection. One or more such routes can be employed. Parenteral administration can be, for example, by bolus injection or by gradual perfusion over time. Alternatively, or concurrently, administration can be by an oral route.

[0059] By “agent” is meant any small molecule chemical compound, antibody, nucleic acid molecule, or polypeptide, or fragments thereof.

[0060] By “alteration” is meant a change (increase or decrease) in the expression levels or activity of a gene or polypeptide as detected by standard art known methods such as those described herein. As used herein, an alteration includes a 10% change in expression levels, a 25% change, a 40% change, and a 50% or greater change in expression levels.

[0061] By “ameliorate” is meant decrease, suppress, attenuate, diminish, arrest, or stabilize the development or progression of a disease.

[0062] By “analog” is meant a molecule that is not identical, but has analogous functional or structural features. For example, a polypeptide analog retains the biological activity of a corresponding naturally-occurring polypeptide, while having certain biochemical modifications that enhance the analog's function relative to a naturally occurring polypeptide. Such biochemical modifications could increase the analog's protease resistance, membrane permeability, or half-life, without altering, for example, ligand binding. An analog may include an unnatural amino acid.

[0063] As used herein, the term “antibody” refers to an immunoglobulin molecule that specifically binds to, or is immunologically reactive with, a particular antigen, and includes polyclonal, monoclonal, genetically engineered, and otherwise modified forms of antibodies, including but not limited to chimeric antibodies, humanized antibodies, heteroconjugate antibodies (e.g., bi- tri- and quad-specific antibodies, diabodies, triabodies, and tetrabodies), and antigen binding fragments of antibodies, including, for example, Fab′, F(ab′)2, Fab, Fv, rIgG, and scFv fragments. Unless otherwise indicated, the term “monoclonal antibody” (mAb) is meant to include both intact molecules, as well as antibody fragments (including, for example, Fab and F(ab′)2 fragments) that are capable of specifically binding to a target protein. As used herein, the Fab and F(ab′)2 fragments refer to antibody fragments that lack the Fc fragment of an intact antibody. Examples of these antibody fragments are described herein.

[0064] By “base editor (BE),” or “nucleobase editor polypeptide (NBE)” is meant an agent that binds a polynucleotide and has nucleobase modifying activity. In various embodiments, the base editor comprises a nucleobase modifying polypeptide (e.g., a deaminase) and a polynucleotide programmable nucleotide binding domain in conjunction with a guide polynucleotide (e.g., guide RNA). In various embodiments, the agent is a biomolecular complex comprising a protein domain having base editing activity, i.e., a domain capable of modifying a base (e.g., A, T, C, G, or U) within a nucleic acid molecule (e.g., DNA). In some embodiments, the polynucleotide programmable DNA binding domain is fused or linked to a deaminase domain. In one embodiment, the agent is a fusion protein comprising one or more domains having base editing activity. In another embodiment, the protein domains having base editing activity are linked to the guide RNA (e.g., via an RNA binding motif on the guide RNA and an RNA binding domain fused to the deaminase). In some embodiments, the domains having base editing activity are capable of deaminating a base within a nucleic acid molecule. In some embodiments, the base editor is capable of deaminating one or more bases within a DNA molecule. In some embodiments, the base editor is capable of deaminating a cytosine (C) or an adenosine (A) within DNA. In some embodiments, the base editor is capable of deaminating a cytosine (C) and an adenosine (A) within DNA. In some embodiments, the base editor is a cytidine base editor (CBE). In some embodiments, the base editor is an adenosine base editor (ABE). In some embodiments, the base editor is an adenosine base editor (ABE) and a cytidine base editor (CBE). In some embodiments, the base editor is a nuclease-inactive Cas9 (dCas9) fused to an adenosine deaminase. In some embodiments, the Cas9 is a circular permutant Cas9 (e.g., spCas9 or saCas9). Circular permutant Cas9s are known in the art and described, for example, in Oakes et al., Cell 176, 254-267, 2019. In some embodiments, the base editor is fused to an inhibitor of base excision repair, for example, a UGI domain, or a dISN domain. In some embodiments, the fusion protein comprises a Cas9 nickase fused to a deaminase and an inhibitor of base excision repair, such as a UGI or dISN domain. In other embodiments the base editor is an abasic base editor.

[0065] In some embodiments, an adenosine deaminase is evolved from TadA. In some embodiments, the polynucleotide programmable DNA binding domain is a CRISPR associated (e.g., Cas or Cpf1) enzyme. In some embodiments, the base editor is a catalytically dead Cas9 (dCas9) fused to a deaminase domain. In some embodiments, the base editor is a Cas9 nickase (nCas9) fused to a deaminase domain. In some embodiments, the base editor is fused to an inhibitor of base excision repair (BER). In some embodiments, the inhibitor of base excision repair is a uracil DNA glycosylase inhibitor (UGI). In some embodiments, the inhibitor of base excision repair is an inosine base excision repair inhibitor. Details of base editors are described in International PCT Application Nos. PCT/2017/045381 (WO2018/027078) and PCT/US2016/058344 (WO2017/070632), each of which is incorporated herein by reference for its entirety. Also see Komor, A. C., et al., “Programmable editing of a target base in genomic DNA without double-stranded DNA cleavage” Nature 533, 420-424 (2016); Gaudelli, N. M., et al., “Programmable base editing of A•T to G•C in genomic DNA without DNA cleavage” Nature 551, 464-471 (2017); Komor, A. C., et al., “Improved base excision repair inhibition and bacteriophage Mu Gam protein yields C:G-to-T:A base editors with higher efficiency and product purity” Science Advances 3:eaao4774 (2017), and Rees, H. A., et al., “Base editing: precision chemistry on the genome and transcriptome of living cells.” Nat Rev Genet. 2018 December; 19(12):770-788. doi: 10.1038/s41576-018-0059-1, the entire contents of which are hereby incorporated by reference.

[0066] In some embodiments, base editors are generated (e.g., ABE8) by cloning an adenosine deaminase variant (e.g., TadA*8) into a scaffold that includes a circular permutant Cas9 (e.g., spCAS9) and a bipartite nuclear localization sequence. Circular permutant Cas9s are known in the art and described, for example, in Oakes et al., Cell 176, 254-267, 2019. Exemplary circular permutant sequences are set forth below, in which the bold sequence indicates sequence derived from Cas9, the italics sequence denotes a linker sequence, and the underlined sequence denotes a bipartite nuclear localization sequence.

CP5 (with MSP “NGC=Pam Variant with mutations Regular Cas9 likes NGG” PID=Protein Interacting Domain and “D10A” nickase):

EIGKATAKYFFYSNIMNFFKTEITLANGEIRKRPLIETNGETGEIVWDKG
RDFATVRKVLSMPQVNIVKKTEVQTGGFSKESILPKRNSDKLIARKKDWD
PKKYGGFMQPTVAYSVLVVAKVEKGKSKKLKSVKELLGITIMERSSFEKN
PIDFLEAKGYKEVKKDLIIKLPKYSLFELENGRKRMLASAKFLQKGNELA
LPSKYVNFLYLASHYEKLKGSPEDNEQKQLFVEQHKHYLDEIIEQISEFS
KRVILADANLDKVLSAYNKHRDKPIREQAENIIHLFTLTNLGAPRAFKYF
DTTIARKEYRSTKEVLDATLIHQSITGLYETRIDLSQLGGDGGSGGSGGS
GGSGGSGGSGGMDKKYSIGLAIGTNSVGWAVITDEYKVPSKKFKVLGNTD
RHSIKKNLIGALLFDSGETAEATRLKRTARRRYTRRKNRICYLQEIFSNE
MAKVDDSFFHRLEESFLVEEDKKHERHPIFGNIVDEVAYHEKYPTIYHLR
KKLVDSTDKADLRLIYLALAHMIKFRGHFLIEGDLNPDNSDVDKLFIQLV
QTYNQLFEENPINASGVDAKAILSARLSKSRRLENLIAQLPGEKKNGLFG
NLIALSLGLTPNFKSNFDLAEDAKLQLSKDTYDDDLDNLLAQIGDQYADL
FLAAKNLSDAILLSDILRVNTEITKAPLSASMIKRYDEHHQDLTLLKALV
RQQLPEKYKEIFFDQSKNGYAGYIDGGASQEEFYKFIKPILEKMDGTEEL
LVKLNREDLLRKQRTFDNGSIPHQIHLGELHAILRRQEDFYPFLKDNREK
IEKILTFRIPYYVGPLARGNSRFAWMTRKSEETITPWNFEEVVDKGASAQ
SFIERMTNFDKNLPNEKVLPKHSLLYEYFTVYNELTKVKYVTEGMRKPAF
LSGEQKKAIVDLLFKTNRKVTVKQLKEDYEKKIECFDSVEISGVEDRFNA
SLGTYHDLLKIIKDKDFLDNEENEDILEDIVLTLTLFEDREMIEERLKTY
AHLFDDKVMKQLKRRRYTGWGRLSRKLINGIRDKQSGKTILDFLKSDGFA
NRNEMQLIHDDSLTFKEDIQKAQVSGQGDSLHEHIANLAGSPAIKKGILQ
TVKVVDELVKVMGRHKPENIVIEMARENQTTQKGQKNSRERMKRIEEGIK
ELGSQILKEHPVENTQLQNEKLYLYYLQNGRDMYVDQELDINRLSDYDVD
HIVPQSFLKDDSIDNKVLTRSDKNRGKSDNVPSEEVVKKMKNYWRQLLNA
KLITQRKFDNLTKAERGGLSELDKAGFIKRQLVETRQITKHVAQILDSRM
NTKYDENDKLIREVKVITLKSKLVSDFRKDFQFYKVREINNYHHAHDAYL
NAVVGTALIKKYPKLESEFVYGDYKVYDVRKMIAKSEQEGADKRTADGSE
FESPKKKRKV*

[0067] In some embodiments, the ABE8 is selected from a base editor from Table 10, 11 or 13 infra. In some embodiments, ABE8 contains an adenosine deaminase variant evolved from TadA. In some embodiments, the adenosine deaminase variant of ABE8 is a TadA*8 variant as described in Table 8, 10, 11, or 13 infra. In some embodiments, the adenosine deaminase variant is the TadA*7.10 variant (e.g., TadA*8) comprising one or more of an alteration selected from the group consisting of Y147T, Y147R, Q154S, Y123H, V82S, T166R, and/or Q154R. In various embodiments, ABE8 comprises TadA*7.10 variant (e.g. TadA*8) with a combination of alterations selected from the group of Y147T+Q154R; Y147T+Q154S; Y147R+Q154S; V82S+Q154S; V82S+Y147R; V82S+Q154R; V82S+Y123H; I76Y+V82S; V82S+Y123H+Y147T; V82S+Y123H+Y147R; V82S+Y123H+Q154R; Y147R+Q154R+Y123H; Y147R+Q154R+I76Y; Y147R+Q154R+T166R; Y123H+Y147R+Q154R+I76Y; V82S+Y123H+Y147R+Q154R; and I76Y+V82S+Y123H+Y147R+Q154R.

[0068] In some embodiments ABE8 is a monomeric construct. In some embodiments, ABE8 is a heterodimeric construct. In some embodiments the ABE8 base editor comprises the sequence:

MSEVEFSHEYWMRHALTLAKRARDEREVPVGAVLVLNNRVIGEGWNRAIG
LHDPTAHAEIMALRQGGLVMQNYRLIDATLYVTFEPCVMCAGAMIHSRIG
RVVFGVRNAKTGAAGSLMDVLHYPGMNHRVEITEGILADECAALLCTFFR
MPRQVFNAQKKAQSSTD

[0069] By way of example, the adenine base editor ABE to be used in the base editing compositions, systems and methods described herein has the nucleic acid sequence (8877 base pairs), (Addgene, Watertown, Mass.; Gaudelli N M, et al., Nature. 2017 Nov. 23; 551(7681):464-471. doi: 10.1038/nature24644; Koblan L W, et al., Nat Biotechnol. 2018 October; 36(9):843-846. doi: 10.1038/nbt.4172.) as provided below. Polynucleotide sequences having at least 95% or greater identity to the ABE nucleic acid sequence are also encompassed.

ATATGCCAAGTACGCCCCCTATTGACGTCAATGACGGTAAATGGCCCGCCTGGCATTATGCCCAGTACAT
GACCTTATGGGACTTTCCTACTTGGCAGTACATCTACGTATTAGTCATCGCTATTACCATGGTGATGCGG
TTTTGGCAGTACATCAATGGGCGTGGATAGCGGTTTGACTCACGGGGATTTCCAAGTCTCCACCCCATTG
ACGTCAATGGGAGTTTGTTTTGGCACCAAAATCAACGGGACTTTCCAAAATGTCGTAACAACTCCGCCCC
ATTGACGCAAATGGGCGGTAGGCGTGTACGGTGGGAGGTCTATATAAGCAGAGCTGGTTTAGTGAACCGT
CAGATCCGCTAGAGATCCGCGGCCGCTAATACGACTCACTATAGGGAGAGCCGCCACCATGAAACGGACA
GCCGACGGAAGCGAGTTCGAGTCACCAAAGAAGAAGCGGAAAGTCTCTGAAGTCGAGTTTAGCCACGAGT
ATTGGATGAGGCACGCACTGACCCTGGCAAAGCGAGCATGGGATGAAAGAGAAGTCCCCGTGGGCGCCGT
GCTGGTGCACAACAATAGAGTGATCGGAGAGGGATGGAACAGGCCAATCGGCCGCCACGACCCTACCGCA
CACGCAGAGATCATGGCACTGAGGCAGGGAGGCCTGGTCATGCAGAATTACCGCCTGATCGATGCCACCC
TGTATGTGACACTGGAGCCATGCGTGATGTGCGCAGGAGCAATGATCCACAGCAGGATCGGAAGAGTGGT
GTTCGGAGCACGGGACGCCAAGACCGGCGCAGCAGGCTCCCTGATGGATGTGCTGCACCACCCCGGCATG
AACCACCGGGTGGAGATCACAGAGGGAATCCTGGCAGACGAGTGCGCCGCCCTGCTGAGCGATTTCTTTA
GAATGCGGAGACAGGAGATCAAGGCCCAGAAGAAGGCACAGAGCTCCACCGACTCTGGAGGATCTAGCGG
AGGATCCTCTGGAAGCGAGACACCAGGCACAAGCGAGTCCGCCACACCAGAGAGCTCCGGCGGCTCCTCC
GGAGGATCCTCTGAGGTGGAGTTTTCCCACGAGTACTGGATGAGACATGCCCTGACCCTGGCCAAGAGGG
CACGCGATGAGAGGGAGGTGCCTGTGGGAGCCGTGCTGGTGCTGAACAATAGAGTGATCGGCGAGGGCTG
GAACAGAGCCATCGGCCTGCACGACCCAACAGCCCATGCCGAAATTATGGCCCTGAGACAGGGCGGCCTG
GTCATGCAGAACTACAGACTGATTGACGCCACCCTGTACGTGACATTCGAGCCTTGCGTGATGTGCGCCG
GCGCCATGATCCACTCTAGGATCGGCCGCGTGGTGTTTGGCGTGAGGAACGCAAAAACCGGCGCCGCAGG
CTCCCTGATGGACGTGCTGCACTACCCCGGCATGAATCACCGCGTCGAAATTACCGAGGGAATCCTGGCA
GATGAATGTGCCGCCCTGCTGTGCTATTTCTTTCGGATGCCTAGACAGGTGTTCAATGCTCAGAAGAAGG
CCCAGAGCTCCACCGACTCCGGAGGATCTAGCGGAGGCTCCTCTGGCTCTGAGACACCTGGCACAAGCGA
GAGCGCAACACCTGAAAGCAGCGGGGGCAGCAGCGGGGGGTCAGACAAGAAGTACAGCATCGGCCTGGCC
ATCGGCACCAACTCTGTGGGCTGGGCCGTGATCACCGACGAGTACAAGGTGCCCAGCAAGAAATTCAAGG
TGCTGGGCAACACCGACCGGCACAGCATCAAGAAGAACCTGATCGGAGCCCTGCTGTTCGACAGCGGCGA
AACAGCCGAGGCCACCCGGCTGAAGAGAACCGCCAGAAGAAGATACACCAGACGGAAGAACCGGATCTGC
TATCTGCAAGAGATCTTCAGCAACGAGATGGCCAAGGTGGACGACAGCTTCTTCCACAGACTGGAAGAGT
CCTTCCTGGTGGAAGAGGATAAGAAGCACGAGCGGCACCCCATCTTCGGCAACATCGTGGACGAGGTGGC
CTACCACGAGAAGTACCCCACCATCTACCACCTGAGAAAGAAACTGGTGGACAGCACCGACAAGGCCGAC
CTGCGGCTGATCTATCTGGCCCTGGCCCACATGATCAAGTTCCGGGGCCACTTCCTGATCGAGGGCGACC
TGAACCCCGACAACAGCGACGTGGACAAGCTGTTCATCCAGCTGGTGCAGACCTACAACCAGCTGTTCGA
GGAAAACCCCATCAACGCCAGCGGCGTGGACGCCAAGGCCATCCTGTCTGCCAGACTGAGCAAGAGCAGA
CGGCTGGAAAATCTGATCGCCCAGCTGCCCGGCGAGAAGAAGAATGGCCTGTTCGGAAACCTGATTGCCC
TGAGCCTGGGCCTGACCCCCAACTTCAAGAGCAACTTCGACCTGGCCGAGGATGCCAAACTGCAGCTGAG
CAAGGACACCTACGACGACGACCTGGACAACCTGCTGGCCCAGATCGGCGACCAGTACGCCGACCTGTTT
CTGGCCGCCAAGAACCTGTCCGACGCCATCCTGCTGAGCGACATCCTGAGAGTGAACACCGAGATCACCA
AGGCCCCCCTGAGCGCCTCTATGATCAAGAGATACGACGAGCACCACCAGGACCTGACCCTGCTGAAAGC
TCTCGTGCGGCAGCAGCTGCCTGAGAAGTACAAAGAGATTTTCTTCGACCAGAGCAAGAACGGCTACGCC
GGCTACATTGACGGCGGAGCCAGCCAGGAAGAGTTCTACAAGTTCATCAAGCCCATCCTGGAAAAGATGG
ACGGCACCGAGGAACTGCTCGTGAAGCTGAACAGAGAGGACCTGCTGCGGAAGCAGCGGACCTTCGACAA
CGGCAGCATCCCCCACCAGATCCACCTGGGAGAGCTGCACGCCATTCTGCGGCGGCAGGAAGATTTTTAC
CCATTCCTGAAGGACAACCGGGAAAAGATCGAGAAGATCCTGACCTTCCGCATCCCCTACTACGTGGGCC
CTCTGGCCAGGGGAAACAGCAGATTCGCCTGGATGACCAGAAAGAGCGAGGAAACCATCACCCCCTGGAA
CTTCGAGGAAGTGGTGGACAAGGGCGCTTCCGCCCAGAGCTTCATCGAGCGGATGACCAACTTCGATAAG
AACCTGCCCAACGAGAAGGTGCTGCCCAAGCACAGCCTGCTGTACGAGTACTTCACCGTGTATAACGAGC
TGACCAAAGTGAAATACGTGACCGAGGGAATGAGAAAGCCCGCCTTCCTGAGCGGCGAGCAGAAAAAGGC
CATCGTGGACCTGCTGTTCAAGACCAACCGGAAAGTGACCGTGAAGCAGCTGAAAGAGGACTACTTCAAG
AAAATCGAGTGCTTCGACTCCGTGGAAATCTCCGGCGTGGAAGATCGGTTCAACGCCTCCCTGGGCACAT
ACCACGATCTGCTGAAAATTATCAAGGACAAGGACTTCCTGGACAATGAGGAAAACGAGGACATTCTGGA
AGATATCGTGCTGACCCTGACACTGTTTGAGGACAGAGAGATGATCGAGGAACGGCTGAAAACCTATGCC
CACCTGTTCGACGACAAAGTGATGAAGCAGCTGAAGCGGCGGAGATACACCGGCTGGGGCAGGCTGAGCC
GGAAGCTGATCAACGGCATCCGGGACAAGCAGTCCGGCAAGACAATCCTGGATTTCCTGAAGTCCGACGG
CTTCGCCAACAGAAACTTCATGCAGCTGATCCACGACGACAGCCTGACCTTTAAAGAGGACATCCAGAAA
GCCCAGGTGTCCGGCCAGGGCGATAGCCTGCACGAGCACATTGCCAATCTGGCCGGCAGCCCCGCCATTA
AGAAGGGCATCCTGCAGACAGTGAAGGTGGTGGACGAGCTCGTGAAAGTGATGGGCCGGCACAAGCCCGA
GAACATCGTGATCGAAATGGCCAGAGAGAACCAGACCACCCAGAAGGGACAGAAGAACAGCCGCGAGAGA
ATGAAGCGGATCGAAGAGGGCATCAAAGAGCTGGGCAGCCAGATCCTGAAAGAACACCCCGTGGAAAACA
CCCAGCTGCAGAACGAGAAGCTGTACCTGTACTACCTGCAGAATGGGCGGGATATGTACGTGGACCAGGA
ACTGGACATCAACCGGCTGTCCGACTACGATGTGGACCATATCGTGCCTCAGAGCTTTCTGAAGGACGAC
TCCATCGACAACAAGGTGCTGACCAGAAGCGACAAGAACCGGGGCAAGAGCGACAACGTGCCCTCCGAAG
AGGTCGTGAAGAAGATGAAGAACTACTGGCGGCAGCTGCTGAACGCCAAGCTGATTACCCAGAGAAAGTT
CGACAATCTGACCAAGGCCGAGAGAGGCGGCCTGAGCGAACTGGATAAGGCCGGCTTCATCAAGAGACAG
CTGGTGGAAACCCGGCAGATCACAAAGCACGTGGCACAGATCCTGGACTCCCGGATGAACACTAAGTACG
ACGAGAATGACAAGCTGATCCGGGAAGTGAAAGTGATCACCCTGAAGTCCAAGCTGGTGTCCGATTTCCG
GAAGGATTTCCAGTTTTACAAAGTGCGCGAGATCAACAACTACCACCACGCCCACGACGCCTACCTGAAC
GCCGTCGTGGGAACCGCCCTGATCAAAAAGTACCCTAAGCTGGAAAGCGAGTTCGTGTACGGCGACTACA
AGGTGTACGACGTGCGGAAGATGATCGCCAAGAGCGAGCAGGAAATCGGCAAGGCTACCGCCAAGTACTT
CTTCTACAGCAACATCATGAACTTTTTCAAGACCGAGATTACCCTGGCCAACGGCGAGATCCGGAAGCGG
CCTCTGATCGAGACAAACGGCGAAACCGGGGAGATCGTGTGGGATAAGGGCCGGGATTTTGCCACCGTGC
GGAAAGTGCTGAGCATGCCCCAAGTGAATATCGTGAAAAAGACCGAGGTGCAGACAGGCGGCTTCAGCAA
AGAGTCTATCCTGCCCAAGAGGAACAGCGATAAGCTGATCGCCAGAAAGAAGGACTGGGACCCTAAGAAG
TACGGCGGCTTCGACAGCCCCACCGTGGCCTATTCTGTGCTGGTGGTGGCCAAAGTGGAAAAGGGCAAGT
CCAAGAAACTGAAGAGTGTGAAAGAGCTGCTGGGGATCACCATCATGGAAAGAAGCAGCTTCGAGAAGAA
TCCCATCGACTTTCTGGAAGCCAAGGGCTACAAAGAAGTGAAAAAGGACCTGATCATCAAGCTGCCTAAG
TACTCCCTGTTCGAGCTGGAAAACGGCCGGAAGAGAATGCTGGCCTCTGCCGGCGAACTGCAGAAGGGAA
ACGAACTGGCCCTGCCCTCCAAATATGTGAACTTCCTGTACCTGGCCAGCCACTATGAGAAGCTGAAGGG
CTCCCCCGAGGATAATGAGCAGAAACAGCTGTTTGTGGAACAGCACAAGCACTACCTGGACGAGATCATC
GAGCAGATCAGCGAGTTCTCCAAGAGAGTGATCCTGGCCGACGCTAATCTGGACAAAGTGCTGTCCGCCT
ACAACAAGCACCGGGATAAGCCCATCAGAGAGCAGGCCGAGAATATCATCCACCTGTTTACCCTGACCAA
TCTGGGAGCCCCTGCCGCCTTCAAGTACTTTGACACCACCATCGACCGGAAGAGGTACACCAGCACCAAA
GAGGTGCTGGACGCCACCCTGATCCACCAGAGCATCACCGGCCTGTACGAGACACGGATCGACCTGTCTC
AGCTGGGAGGTGACTCTGGCGGCTCAAAAAGAACCGCCGACGGCAGCGAATTCGAGCCCAAGAAGAAGAG
GAAAGTCTAACCGGTCATCATCACCATCACCATTGAGTTTAAACCCGCTGATCAGCCTCGACTGTGCCTT
CTAGTTGCCAGCCATCTGTTGTTTGCCCCTCCCCCGTGCCTTCCTTGACCCTGGAAGGTGCCACTCCCAC
TGTCCTTTCCTAATAAAATGAGGAAATTGCATCGCATTGTCTGAGTAGGTGTCATTCTATTCTGGGGGGT
GGGGTGGGGCAGGACAGCAAGGGGGAGGATTGGGAAGACAATAGCAGGCATGCTGGGGATGCGGTGGGCT
CTATGGCTTCTGAGGCGGAAAGAACCAGCTGGGGCTCGATACCGTCGACCTCTAGCTAGAGCTTGGCGTA
ATCATGGTCATAGCTGTTTCCTGTGTGAAATTGTTATCCGCTCACAATTCCACACAACATACGAGCCGGA
AGCATAAAGTGTAAAGCCTAGGGTGCCTAATGAGTGAGCTAACTCACATTAATTGCGTTGCGCTCACTGC
CCGCTTTCCAGTCGGGAAACCTGTCGTGCCAGCTGCATTAATGAATCGGCCAACGCGCGGGGAGAGGCGG
TTTGCGTATTGGGCGCTCTTCCGCTTCCTCGCTCACTGACTCGCTGCGCTCGGTCGTTCGGCTGCGGCGA
GCGGTATCAGCTCACTCAAAGGCGGTAATACGGTTATCCACAGAATCAGGGGATAACGCAGGAAAGAACA
TGTGAGCAAAAGGCCAGCAAAAGGCCAGGAACCGTAAAAAGGCCGCGTTGCTGGCGTTTTTCCATAGGCT
CCGCCCCCCTGACGAGCATCACAAAAATCGACGCTCAAGTCAGAGGTGGCGAAACCCGACAGGACTATAA
AGATACCAGGCGTTTCCCCCTGGAAGCTCCCTCGTGCGCTCTCCTGTTCCGACCCTGCCGCTTACCGGAT
ACCTGTCCGCCTTTCTCCCTTCGGGAAGCGTGGCGCTTTCTCATAGCTCACGCTGTAGGTATCTCAGTTC
GGTGTAGGTCGTTCGCTCCAAGCTGGGCTGTGTGCACGAACCCCCCGTTCAGCCCGACCGCTGCGCCTTA
TCCGGTAACTATCGTCTTGAGTCCAACCCGGTAAGACACGACTTATCGCCACTGGCAGCAGCCACTGGTA
ACAGGATTAGCAGAGCGAGGTATGTAGGCGGTGCTACAGAGTTCTTGAAGTGGTGGCCTAACTACGGCTA
CACTAGAAGAACAGTATTTGGTATCTGCGCTCTGCTGAAGCCAGTTACCTTCGGAAAAAGAGTTGGTAGC
TCTTGATCCGGCAAACAAACCACCGCTGGTAGCGGTGGTTTTTTTGTTTGCAAGCAGCAGATTACGCGCA
GAAAAAAAGGATCTCAAGAAGATCCTTTGATCTTTTCTACGGGGTCTGACACTCAGTGGAACGAAAACTC
ACGTTAAGGGATTTTGGTCATGAGATTATCAAAAAGGATCTTCACCTAGATCCTTTTAAATTAAAAATGA
AGTTTTAAATCAATCTAAAGTATATATGAGTAAACTTGGTCTGACAGTTACCAATGCTTAATCAGTGAGG
CACCTATCTCAGCGATCTGTCTATTTCGTTCATCCATAGTTGCCTGACTCCCCGTCGTGTAGATAACTAC
GATACGGGAGGGCTTACCATCTGGCCCCAGTGCTGCAATGATACCGCGAGACCCACGCTCACCGGCTCCA
GATTTATCAGCAATAAACCAGCCAGCCGGAAGGGCCGAGCGCAGAAGTGGTCCTGCAACTTTATCCGCCT
CCATCCAGTCTATTAATTGTTGCCGGGAAGCTAGAGTAAGTAGTTCGCCAGTTAATAGTTTGCGCAACGT
TGTTGCCATTGCTACAGGCATCGTGGTGTCACGCTCGTCGTTTGGTATGGCTTCATTCAGCTCCGGTTCC
CAACGATCAAGGCGAGTTACATGATCCCCCATGTTGTGCAAAAAAGCGGTTAGCTCCTTCGGTCCTCCGA
TCGTTGTCAGAAGTAAGTTGGCCGCAGTGTTATCACTCATGGTTATGGCAGCACTGCATAATTCTCTTAC
TGTCATGCCATCCGTAAGATGCTTTTCTGTGACTGGTGAGTACTCAACCAAGTCATTCTGAGAATAGTGT
ATGCGGCGACCGAGTTGCTCTTGCCCGGCGTCAATACGGGATAATACCGCGCCACATAGCAGAACTTTAA
AAGTGCTCATCATTGGAAAACGTTCTTCGGGGCGAAAACTCTCAAGGATCTTACCGCTGTTGAGATCCAG
TTCGATGTAACCCACTCGTGCACCCAACTGATCTTCAGCATCTTTTACTTTCACCAGCGTTTCTGGGTGA
GCAAAAACAGGAAGGCAAAATGCCGCAAAAAAGGGAATAAGGGCGACACGGAAATGTTGAATACTCATAC
TCTTCCTTTTTCAATATTATTGAAGCATTTATCAGGGTTATTGTCTCATGAGCGGATACATATTTGAATG
TATTTAGAAAAATAAACAAATAGGGGTTCCGCGCACATTTCCCCGAAAAGTGCCACCTGACGTCGACGGA
TCGGGAGATCGATCTCCCGATCCCCTAGGGTCGACTCTCAGTACAATCTGCTCTGATGCCGCATAGTTAA
GCCAGTATCTGCTCCCTGCTTGTGTGTTGGAGGTCGCTGAGTAGTGCGCGAGCAAAATTTAAGCTACAAC
AAGGCAAGGCTTGACCGACAATTGCATGAAGAATCTGCTTAGGGTTAGGCGTTTTGCGCTGCTTCGCGAT
GTACGGGCCAGATATACGCGTTGACATTGATTATTGACTAGTTATTAATAGTAATCAATTACGGGGTCAT
TAGTTCATAGCCCATATATGGAGTTCCGCGTTACATAACTTACGGTAAATGGCCCGCCTGGCTGACCGCC
CAACGACCCCCGCCCATTGACGTCAATAATGACGTATGTTCCCATAGTAACGCCAATAGGGACTTTCCAT
TGACGTCAATGGGTGGAGTATTTACGGTAAACTGCCCACTTGGCAGTACATCAAGTGTATC

[0070] By way of example, a cytidine base editor (CBE) as used in the base editing compositions, systems and methods described herein has the following nucleic acid sequence (8877 base pairs), (Addgene, Watertown, Mass.; Komor A C, et al., 2017, Sci Adv., 30; 3(8):eaao4774. doi: 10.1126/sciadv.aao4774) as provided below. Polynucleotide sequences having at least 95% or greater identity to the BE4 nucleic acid sequence are also encompassed.

| | |
|---|---|
| 1 | ATATGCCAAG TACGCCCCCT ATTGACGTCA ATGACGGTAA ATGGCCCGCC TGGCATTATG |
| 61 | CCCAGTACAT GACCTTATGG GACTTTCCTA CTTGGCAGTA CATCTACGTA TTAGTCATCG |
| 121 | CTATTACCAT GGTGATGCGG TTTTGGCAGT ACATCAATGG GCGTGGATAG CGGTTTGACT |
| 181 | CACGGGGATT TCCAAGTCTC CACCCCATTG ACGTCAATGG GAGTTTGTTT TGGCACCAAA |
| 241 | ATCAACGGGA CTTTCCAAAA TGTCGTAACA ACTCCGCCCC ATTGACGCAA ATGGGCGGTA |
| 301 | GGCGTGTACG GTGGGAGGTC TATATAAGCA GAGCTGGTTT AGTGAACCGT CAGATCCGCT |
| 361 | AGAGATCCGC GGCCGCTAAT ACGACTCACT ATAGGGAGAG CCGCCACCAT GAGCTCAGAG |
| 421 | ACTGGCCCAG TGGCTGTGGA CCCCACATTG AGACGGCGGA TCGAGCCCCA TGAGTTTGAG |
| 481 | GTATTCTTCG ATCCGAGAGA GCTCCGCAAG GAGACCTGCC TGCTTTACGA AATTAATTGG |
| 541 | GGGGGCCGGC ACTCCATTTG GCGACATACA TCACAGAACA CTAACAAGCA CGTCGAAGTC |
| 601 | AACTTCATCG AGAAGTTCAC GACAGAAAGA TATTTCTGTC CGAACACAAG GTGCAGCATT |
| 661 | ACCTGGTTTC TCAGCTGGAG CCCATGCGGC GAATGTAGTA GGGCCATCAC TGAATTCCTG |
| 721 | TCAAGGTATC CCCACGTCAC TCTGTTTATT TACATCGCAA GGCTGTACCA CCACGCTGAC |
| 781 | ccccgcaatc GACAAGGCCT GCGGGATTTG ATCTCTTCAG GTGTGACTAT CCAAATTATG |
| 841 | ACTGAGCAGG AGTCAGGATA CTGCTGGAGA AACTTTGTGA ATTATAGCCC GAGTAATGAA |
| 901 | GCCCACTGGC CTAGGTATCC CCATCTGTGG GTACGACTGT ACGTTCTTGA ACTGTACTGC |
| 961 | ATCATACTGG GCCTGCCTCC TTGTCTCAAC ATTCTGAGAA GGAAGCAGCC ACAGCTGACA |
| 1021 | TTCTTTACCA TCGCTCTTCA GTCTTGTCAT TACCAGCGAC TGCCCCCACA CATTCTCTGG |
| 1081 | GCCACCGGGT TGAAATCTGG TGGTTCTTCT GGTGGTTCTA GCGGCAGCGA GACTCCCGGG |
| 1141 | ACCTCAGAGT CCGCCACACC CGAAAGTTCT GGTGGTTCTT CTGGTGGTTC TGATAAAAAG |
| 1201 | TATTCTATTG GTTTAGCCAT CGGCACTAAT TCCGTTGGAT GGGCTGTCAT AACCGATGAA |
| 1261 | TACAAAGTAC CTTCAAAGAA ATTTAAGGTG TTGGGGAACA CAGACCGTCA TTCGATTAAA |
| 1321 | AAGAATCTTA TCGGTGCCCT CCTATTCGAT AGTGGCGAAA CGGCAGAGGC GACTCGCCTG |
| 1381 | AAACGAACCG CTCGGAGAAG GTATACACGT CGCAAGAACC GAATATGTTA CTTACAAGAA |
| 1441 | ATTTTTAGCA ATGAGATGGC CAAAGTTGAC GATTCTTTCT TTCACCGTTT GGAAGAGTCC |
| 1501 | TTCCTTGTCG AAGAGGACAA GAAACATGAA CGGCACCCCA TCTTTGGAAA CATAGTAGAT |
| 1561 | GAGGTGGCAT ATCATGAAAA GTACCCAACG ATTTATCACC TCAGAAAAAA GCTAGTTGAC |
| 1621 | TCAACTGATA AAGCGGACCT GAGGTTAATC TACTTGGCTC TTGCCCATAT GATAAAGTTC |
| 1681 | CGTGGGCACT TTCTCATTGA GGGTGATCTA AATCCGGACA ACTCGGATGT CGACAAACTG |
| 1741 | TTCATCCAGT TAGTACAAAC CTATAATCAG TTGTTTGAAG AGAACCCTAT AAATGCAAGT |
| 1801 | GGCGTGGATG CGAAGGCTAT TCTTAGCGCC CGCCTCTCTA AATCCCGACG GCTAGAAAAC |
| 1861 | CTGATCGCAC AATTACCCGG AGAGAAGAAA AATGGGTTGT TCGGTAACCT TATAGCGCTC |
| 1921 | TCACTAGGCC TGACACCAAA TTTTAAGTCG AACTTCGACT TAGCTGAAGA TGCCAAATTG |
| 1981 | CAGCTTAGTA AGGACACGTA CGATGACGAT CTCGACAATC TACTGGCACA AATTGGAGAT |
| 2041 | CAGTATGCGG ACTTATTTTT GGCTGCCAAA AACCTTAGCG ATGCAATCCT CCTATCTGAC |
| 2101 | ATACTGAGAG TTAATACTGA GATTACCAAG GCGCCGTTAT CCGCTTCAAT GATCAAAAGG |
| 2161 | TACGATGAAC ATCACCAAGA CTTGACACTT CTCAAGGCCC TAGTCCGTCA GCAACTGCCT |
| 2221 | GAGAAATATA AGGAAATATT CTTTGATCAG TCGAAAAACG GGTACGCAGG TTATATTGAC |
| 2281 | GGCGGAGCGA GTCAAGAGGA ATTCTACAAG TTTATCAAAC CCATATTAGA GAAGATGGAT |
| 2341 | GGGACGGAAG AGTTGCTTGT AAAACTCAAT CGCGAAGATC TACTGCGAAA GCAGCGGACT |
| 2401 | TTCGACAACG GTAGCATTCC ACATCAAATC CACTTAGGCG AATTGCATGC TATACTTAGA |
| 2461 | AGGCAGGAGG ATTTTTATCC GTTCCTCAAA GACAATCGTG AAAAGATTGA GAAAATCCTA |
| 2521 | ACCTTTCGCA TACCTTACTA TGTGGGACCC CTGGCCCGAG GGAACTCTCG GTTCGCATGG |
| 2581 | ATGACAAGAA AGTCCGAAGA AACGATTACT CCATGGAATT TTGAGGAAGT TGTCGATAAA |
| 2641 | GGTGCGTCAG CTCAATCGTT CATCGAGAGG ATGACCAACT TTGACAAGAA TTTACCGAAC |
| 2701 | GAAAAAGTAT TGCCTAAGCA CAGTTTACTT TACGAGTATT TCACAGTGTA CAATGAACTC |
| 2761 | ACGAAAGTTA AGTATGTCAC TGAGGGCATG CGTAAACCCG CCTTTCTAAG CGGAGAACAG |
| 2821 | AAGAAAGCAA TAGTAGATCT GTTATTCAAG ACCAACCGCA AAGTGACAGT TAAGCAATTG |
| 2881 | AAAGAGGACT ACTTTAAGAA AATTGAATGC TTCGATTCTG TCGAGATCTC CGGGGTAGAA |
| 2941 | GATCGATTTA ATGCGTCACT TGGTACGTAT CATGACCTCC TAAAGATAAT TAAAGATAAG |
| 3001 | GACTTCCTGG ATAACGAAGA GAATGAAGAT ATCTTAGAAG ATATAGTGTT GACTCTTACC |
| 3061 | CTCTTTGAAG ATCGGGAAAT GATTGAGGAA AGACTAAAAA CATACGCTCA CCTGTTCGAC |
| 3121 | GATAAGGTTA TGAAACAGTT AAAGAGGCGT CGCTATACGG GCTGGGGACG ATTGTCGCGG |
| 3181 | AAACTTATCA ACGGGATAAG AGACAAGCAA AGTGGTAAAA CTATTCTCGA TTTTCTAAAG |
| 3241 | AGCGACGGCT TCGCCAATAG GAACTTTATG CAGCTGATCC ATGATGACTC TTTAACCTTC |
| 3301 | AAAGAGGATA TACAAAAGGC ACAGGTTTCC GGACAAGGGG ACTCATTGCA CGAACATATT |
| 3361 | GCGAATCTTG CTGGTTCGCC AGCCATCAAA AAGGGCATAC TCCAGACAGT CAAAGTAGTG |
| 3421 | GATGAGCTAG TTAAGGTCAT GGGACGTCAC AAACCGGAAA ACATTGTAAT CGAGATGGCA |
| 3481 | CGCGAAAATC AAACGACTCA GAAGGGGCAA AAAAACAGTC GAGAGCGGAT GAAGAGAATA |
| 3541 | GAAGAGGGTA TTAAAGAACT GGGCAGCCAG ATCTTAAAGG AGCATCCTGT GGAAAATACC |
| 3601 | CAATTGCAGA ACGAGAAACT TTACCTCTAT TACCTACAAA ATGGAAGGGA CATGTATGTT |
| 3661 | GATCAGGAAC TGGACATAAA CCGTTTATCT GATTACGACG TCGATCACAT TGTACCCCAA |
| 3721 | TCCTTTTTGA AGGACGATTC AATCGACAAT AAAGTGCTTA CACGCTCGGA TAAGAACCGA |
| 3781 | GGGAAAAGTG ACAATGTTCC AAGCGAGGAA GTCGTAAAGA AAATGAAGAA CTATTGGCGG |
| 3841 | CAGCTCCTAA ATGCGAAACT GATAACGCAA AGAAAGTTCG ATAACTTAAC TAAAGCTGAG |
| 3901 | AGGGGTGGCT TGTCTGAACT TGACAAGGCC GGATTTATTA AACGTCAGCT CGTGGAAACC |
| 3961 | CGCCAAATCA CAAAGCATGT TGCACAGATA CTAGATTCCC GAATGAATAC GAAATACGAC |
| 4021 | GAGAACGATA AGCTGATTCG GGAAGTCAAA GTAATCACTT TAAAGTCAAA ATTGGTGTCG |
| 4081 | GACTTCAGAA AGGATTTTCA ATTCTATAAA GTTAGGGAGA TAAATAACTA CCACCATGCG |
| 4141 | CACGACGCTT ATCTTAATGC CGTCGTAGGG ACCGCACTCA TTAAGAAATA CCCGAAGCTA |
| 4201 | GAAAGTGAGT TTGTGTATGG TGATTACAAA GTTTATGACG TCCGTAAGAT GATCGCGAAA |
| 4261 | AGCGAACAGG AGATAGGCAA GGCTACAGCC AAATACTTCT TTTATTCTAA CATTATGAAT |
| 4321 | TTCTTTAAGA CGGAAATCAC TCTGGCAAAC GGAGAGATAC GCAAACGACC TTTAATTGAA |
| 4381 | ACCAATGGGG AGACAGGTGA AATCGTATGG GATAAGGGCC GGGACTTCGC GACGGTGAGA |
| 4441 | AAAGTTTTGT CCATGCCCCA AGTCAACATA GTAAAGAAAA CTGAGGTGCA GACCGGAGGG |
| 4501 | TTTTCAAAGG AATCGATTCT TCCAAAAAGG AATAGTGATA AGCTCATCGC TCGTAAAAAG |
| 4561 | GACTGGGACC CGAAAAAGTA CGGTGGCTTC GATAGCCCTA CAGTTGCCTA TTCTGTCCTA |
| 4621 | GTAGTGGCAA AAGTTGAGAA GGGAAAATCC AAGAAACTGA AGTCAGTCAA AGAATTATTG |
| 4681 | GGGATAACGA TTATGGAGCG CTCGTCTTTT GAAAAGAACC CCATCGACTT CCTTGAGGCG |
| 4741 | AAAGGTTACA AGGAAGTAAA AAAGGATCTC ATAATTAAAC TACCAAAGTA TAGTCTGTTT |
| 4801 | GAGTTAGAAA ATGGCCGAAA ACGGATGTTG GCTAGCGCCG GAGAGCTTCA AAAGGGGAAC |
| 4861 | GAACTCGCAC TACCGTCTAA ATACGTGAAT TTCCTGTATT TAGCGTCCCA TTACGAGAAG |
| 4921 | TTGAAAGGTT CACCTGAAGA TAACGAACAG AAGCAACTTT TTGTTGAGCA GCACAAACAT |
| 4981 | TATCTCGACG AAATCATAGA GCAAATTTCG GAATTCAGTA AGAGAGTCAT CCTAGCTGAT |
| 5041 | GCCAATCTGG ACAAAGTATT AAGCGCATAC AACAAGCACA GGGATAAACC CATACGTGAG |
| 5101 | CAGGCGGAAA ATATTATCCA TTTGTTTACT CTTACCAACC TCGGCGCTCC AGCCGCATTC |
| 5161 | AAGTATTTTG ACACAACGAT AGATCGCAAA CGATACACTT CTACCAAGGA GGTGCTAGAC |
| 5221 | GCGACACTGA TTCACCAATC CATCACGGGA TTATATGAAA CTCGGATAGA TTTGTCACAG |
| 5281 | CTTGGGGGTG ACTCTGGTGG TTCTGGAGGA TCTGGTGGTT CTACTAATCT GTCAGATATT |
| 5341 | ATTGAAAAGG AGACCGGTAA GCAACTGGTT ATCCAGGAAT CCATCCTCAT GCTCCCAGAG |
| 5401 | GAGGTGGAAG AAGTCATTGG GAACAAGCCG GAAAGCGATA TACTCGTGCA CACCGCCTAC |
| 5461 | GACGAGAGCA CCGACGAGAA TGTCATGCTT CTGACTAGCG ACGCCCCTGA ATACAAGCCT |
| 5521 | TGGGCTCTGG TCATACAGGA TAGCAACGGT GAGAACAAGA TTAAGATGCT CTCTGGTGGT |
| 5581 | TCTGGAGGAT CTGGTGGTTC TACTAATCTG TCAGATATTA TTGAAAAGGA GACCGGTAAG |
| 5641 | CAACTGGTTA TCCAGGAATC CATCCTCATG CTCCCAGAGG AGGTGGAAGA AGTCATTGGG |
| 5701 | AACAAGCCGG AAAGCGATAT ACTCGTGCAC ACCGCCTACG ACGAGAGCAC CGACGAGAAT |
| 5761 | GTCATGCTTC TGACTAGCGA CGCCCCTGAA TACAAGCCTT GGGCTCTGGT CATACAGGAT |
| 5821 | AGCAACGGTG AGAACAAGAT TAAGATGCTC TCTGGTGGTT CTCCCAAGAA GAAGAGGAAA |
| 5881 | GTCTAACCGG TCATCATCAC CATCACCATT GAGTTTAAAC CCGCTGATCA GCCTCGACTG |
| 5941 | TGCCTTCTAG TTGCCAGCCA TCTGTTGTTT GCCCCTCCCC CGTGCCTTCC TTGACCCTGG |
| 6001 | AAGGTGCCAC TCCCACTGTC CTTTCCTAAT AAAATGAGGA AATTGCATCG CATTGTCTGA |
| 6061 | GTAGGTGTCA TTCTATTCTG GGGGGTGGGG TGGGGCAGGA CAGCAAGGGG GAGGATTGGG |
| 6121 | AAGACAATAG CAGGCATGCT GGGGATGCGG TGGGCTCTAT GGCTTCTGAG GCGGAAAGAA |
| 6181 | CCAGCTGGGG CTCGATACCG TCGACCTCTA GCTAGAGCTT GGCGTAATCA TGGTCATAGC |
| 6241 | TGTTTCCTGT GTGAAATTGT TATCCGCTCA CAATTCCACA CAACATACGA GCCGGAAGCA |
| 6301 | TAAAGTGTAA AGCCTAGGGT GCCTAATGAG TGAGCTAACT CACATTAATT GCGTTGCGCT |
| 6361 | CACTGCCCGC TTTCCAGTCG GGAAACCTGT CGTGCCAGCT GCATTAATGA ATCGGCCAAC |
| 6421 | GCGCGGGGAG AGGCGGTTTG CGTATTGGGC GCTCTTCCGC TTCCTCGCTC ACTGACTCGC |
| 6481 | TGCGCTCGGT CGTTCGGCTG CGGCGAGCGG TATCAGCTCA CTCAAAGGCG GTAATACGGT |
| 6541 | TATCCACAGA ATCAGGGGAT AACGCAGGAA AGAACATGTG AGCAAAAGGC CAGCAAAAGG |
| 6601 | CCAGGAACCG TAAAAAGGCC GCGTTGCTGG CGTTTTTCCA TAGGCTCCGC CCCCCTGACG |
| 6661 | AGCATCACAA AAATCGACGC TCAAGTCAGA GGTGGCGAAA CCCGACAGGA CTATAAAGAT |
| 6721 | ACCAGGCGTT TCCCCCTGGA AGCTCCCTCG TGCGCTCTCC TGTTCCGACC CTGCCGCTTA |
| 6781 | CCGGATACCT GTCCGCCTTT CTCCCTTCGG GAAGCGTGGC GCTTTCTCAT AGCTCACGCT |
| 6841 | GTAGGTATCT CAGTTCGGTG TAGGTCGTTC GCTCCAAGCT GGGCTGTGTG CACGAACCCC |
| 6901 | CCGTTCAGCC CGACCGCTGC GCCTTATCCG GTAACTATCG TCTTGAGTCC AACCCGGTAA |
| 6961 | GACACGACTT ATCGCCACTG GCAGCAGCCA CTGGTAACAG GATTAGCAGA GCGAGGTATG |
| 7021 | TAGGCGGTGC TACAGAGTTC TTGAAGTGGT GGCCTAACTA CGGCTACACT AGAAGAACAG |
| 7081 | TATTTGGTAT CTGCGCTCTG CTGAAGCCAG TTACCTTCGG AAAAAGAGTT GGTAGCTCTT |
| 7141 | GATCCGGCAA ACAAACCACC GCTGGTAGCG GTGGTTTTTT TGTTTGCAAG CAGCAGATTA |
| 7201 | CGCGCAGAAA AAAAGGATCT CAAGAAGATC CTTTGATCTT TTCTACGGGG TCTGACGCTC |
| 7261 | AGTGGAACGA AAACTCACGT TAAGGGATTT TGGTCATGAG ATTATCAAAA AGGATCTTCA |
| 7321 | CCTAGATCCT TTTAAATTAA AAATGAAGTT TTAAATCAAT CTAAAGTATA TATGAGTAAA |
| 7381 | CTTGGTCTGA CAGTTACCAA TGCTTAATCA GTGAGGCACC TATCTCAGCG ATCTGTCTAT |
| 7441 | TTCGTTCATC CATAGTTGCC TGACTCCCCG TCGTGTAGAT AACTACGATA CGGGAGGGCT |
| 7501 | TACCATCTGG CCCCAGTGCT GCAATGATAC CGCGAGACCC ACGCTCACCG GCTCCAGATT |
| 7561 | TATCAGCAAT AAACCAGCCA GCCGGAAGGG CCGAGCGCAG AAGTGGTCCT GCAACTTTAT |
| 7621 | CCGCCTCCAT CCAGTCTATT AATTGTTGCC GGGAAGCTAG AGTAAGTAGT TCGCCAGTTA |
| 7681 | ATAGTTTGCG CAACGTTGTT GCCATTGCTA CAGGCATCGT GGTGTCACGC TCGTCGTTTG |
| 7741 | GTATGGCTTC ATTCAGCTCC GGTTCCCAAC GATCAAGGCG AGTTACATGA TCCCCCATGT |
| 7801 | TGTGCAAAAA AGCGGTTAGC TCCTTCGGTC CTCCGATCGT TGTCAGAAGT AAGTTGGCCG |
| 7861 | CAGTGTTATC ACTCATGGTT ATGGCAGCAC TGCATAATTC TCTTACTGTC ATGCCATCCG |
| 7921 | TAAGATGCTT TTCTGTGACT GGTGAGTACT CAACCAAGTC ATTCTGAGAA TAGTGTATGC |
| 7981 | GGCGACCGAG TTGCTCTTGC CCGGCGTCAA TACGGGATAA TACCGCGCCA CATAGCAGAA |
| 8041 | CTTTAAAAGT GCTCATCATT GGAAAACGTT CTTCGGGGCG AAAACTCTCA AGGATCTTAC |
| 8101 | CGCTGTTGAG ATCCAGTTCG ATGTAACCCA CTCGTGCACC CAACTGATCT TCAGCATCTT |
| 8161 | TTACTTTCAC CAGCGTTTCT GGGTGAGCAA AAACAGGAAG GCAAAATGCC GCAAAAAAGG |
| 8221 | GAATAAGGGC GACACGGAAA TGTTGAATAC TCATACTCTT CCTTTTTCAA TATTATTGAA |
| 8281 | GCATTTATCA GGGTTATTGT CTCATGAGCG GATACATATT TGAATGTATT TAGAAAAATA |
| 8341 | AACAAATAGG GGTTCCGCGC ACATTTCCCC GAAAAGTGCC ACCTGACGTC GACGGATCGG |
| 8401 | GAGATCGATC TCCCGATCCC CTAGGGTCGA CTCTCAGTAC AATCTGCTCT GATGCCGCAT |
| 8461 | AGTTAAGCCA GTATCTGCTC CCTGCTTGTG TGTTGGAGGT CGCTGAGTAG TGCGCGAGCA |
| 8521 | AAATTTAAGC TACAACAAGG CAAGGCTTGA CCGACAATTG CATGAAGAAT CTGCTTAGGG |
| 8581 | TTAGGCGTTT TGCGCTGCTT CGCGATGTAC GGGCCAGATA TACGCGTTGA CATTGATTAT |
| 8641 | TGACTAGTTA TTAATAGTAA TCAATTACGG GGTCATTAGT TCATAGCCCA TATATGGAGT |
| 8701 | TCCGCGTTAC ATAACTTACG GTAAATGGCC CGCCTGGCTG ACCGCCCAAC GACCCCCGCC |
| 8761 | CATTGACGTC AATAATGACG TATGTTCCCA TAGTAACGCC AATAGGGACT TTCCATTGAC |
| 8821 | GTCAATGGGT GGAGTATTTA CGGTAAACTG CCCACTTGGC AGTACATCAA GTGTATC |

[0071] In some embodiments, the cytidine base editor is BE4 having a nucleic acid sequence selected from one of the following:

Original BE4 nucleic acid sequence:
ATGagctcagagactggcccagtggctgtggaccccacattgagacggcggatcgagccccatgagtt
tgaggtattcttcgatccgagagagctccgcaaggagacctgcctgctttacgaaattaattgggggg
gccggcactccatttggcgacatacatcacagaacactaacaagcacgtcgaagtcaacttcatcgag
aagttcacgacagaaagatatttctgtccgaacacaaggtgcagcattacctggtttctcagctggag
ccgcgaatgtagtagggccatcactgaattcctgtcaaggtatccccacgtcactctgtttatttaca
tcgcaaggctgtaccaccacgctgacccccgcaatcgacaaggcctgcgggatttgatctcttcaggt
gtgactatccaaattatgactgagcaggagtcaggatactgctggagaaactttgtgaattatagccc
gagtaatgaagcccactggcctaggtatccccatctgtgggtacgactgtacgttcttgaactgtact
gcatcatactgggcctgcctccttgtctcaacattctgagaaggaagcagccacagctgacattcttt
accatcgctcttcagtcttgtcattaccagcgactgcccccacacattctctgggccaccgggttgaa
atctggtggttcttctggtggttctagcggcagcgagactcccgggacctcagagtccgccacacccg
aaagttctggtggttcttctggtggttctgataaaaagtattctattggtttagccatcggcactaat
tccgttggatgggctgtcataaccgatgaatacaaagtaccttcaaagaaatttaaggtgttggggaa
cacagaccgtcattcgattaaaaagaatcttatcggtgccctcctattcgatagtggcgaaacggcag
aggcgactcgcctgaaacgaaccgctcggagaaggtatacacgtcgcaagaaccgaatatgttactta
caagaaatttttagcaatgagatggccaaagttgacgattctttctttcaccgtttggaagagtcctt
ccttgtcgaagaggacaagaaacatgaacggcaccccatctttggaaacatagtagatgaggtggcat
atcatgaaaagtacccaacgatttatcacctcagaaaaaagctagttgactcaactgataaagcggac
ctgaggttaatctacttggctcttgcccatatgataaagttccgtgggcactttctcattgagggtga
tctaaatccggacaactcggatgtcgacaaactgttcatccagttagtacaaacctataatcagttgt
ttgaagagaaccctataaatgcaagtggcgtggatgcgaaggctattcttagcgcccgcctctctaaa
tcccgacggctagaaaacctgatcgcacaattacccggagagaagaaaaatgggttgttcggtaacct
tatagcgctctcactaggcctgacaccaaattttaagtcgaacttcgacttagctgaagatgccaaat
tgcagcttagtaaggacacgtacgatgacgatctcgacaatctactggcacaaattggagatcagtat
gcggacttatttttggctgccaaaaaccttagcgatgcaatcctcctatctgacatactgagagttaa
tactgagattaccaaggcgccgttatccgcttcaatgatcaaaaggtacgatgaacatcaccaagact
tgacacttctcaaggccctagtccgtcagcaactgcctgagaaatataaggaaatattctttgatcag
tcgaaaaacgggtacgcaggttatattgacggcggagcgagtcaagaggaattctacaagtttatcaa
acccatattagagaagatggatgggacggaagagttgcttgtaaaactcaatcgcgaagatctactgc
gaaagcagcggactttcgacaacggtagcattccacatcaaatccacttaggcgaattgcatgctata
cttagaaggcaggaggatttttatccgttcctcaaagacaatcgtgaaaagattgagaaaatcctaac
ctttcgcataccttactatgtgggacccctggcccgagggaactctcggttcgcatggatgacaagaa
agtccgaagaaacgattactccatggaattttgaggaagttgtcgataaaggtgcgtcagetcaateg
ttcatcgagaggatgaccaactttgacaagaatttaccgaacgaaaaagtattgcctaagcacagttt
actttacgagtatttcacagtgtacaatgaactcacgaaagttaagtatgtcactgagggcatgcgta
aacccgcctttctaagcggagaacagaagaaagcaatagtagatctgttattcaagaccaaccgcaaa
gtgacagttaagcaattgaaagaggactactttaagaaaattgaatgcttcgattctgtcgagatctc
cggggtagaagatcgatttaatgcgtcacttggtacgtatcatgacctcctaaagataattaaagata
aggacttcctggataacgaagagaatgaagatatcttagaagatatagtgttgactcttaccctcttt
gaagatcgggaaatgattgaggaaagactaaaaacatacgctcacctgttcgacgataaggttatgaa
acagttaaagaggcgtcgctatacgggctggggacgattgtcgcggaaacttatcaacgggataagag
acaagcaaagtggtaaaactattctcgattttctaaagagcgacggcttcgccaataggaactttatg
cagctgatccatgatgactctttaaccttcaaagaggatatacaaaaggcacaggtttccggacaagg
ggactcattgcacgaacatattgcgaatcttgctggttcgccagccatcaaaaagggcatactccaga
cagtcaaagtagtggatgagetagttaaggtcatgggacgtcacaaaccggaaaacattgtaategag
atggcacgcgaaaatcaaacgactcagaaggggcaaaaaaacagtcgagagcggatgaagagaataga
agagggtattaaagaactgggcagccagatcttaaaggagcatcctgtggaaaatacccaattgcaga
acgagaaactttacctctattacctacaaaatggaagggacatgtatgttgatcaggaactggacata
aaccgtttatctgattacgacgtcgatcacattgtaccccaatcctttttgaaggacgattcaatcga
caataaagtgcttacacgctcggataagaaccgagggaaaagtgacaatgttccaagcgaggaagtcg
taaagaaaatgaagaactattggcggcagctcctaaatgcgaaactgataacgcaaagaaagttcgat
aacttaactaaagctgagaggggtggcttgtctgaacttgacaaggccggatttattaaacgtcagct
cgtggaaacccgccaaatcacaaagcatgttgcacagatactagattcccgaatgaatacgaaatacg
acgagaacgataagctgattcgggaagtcaaagtaatcactttaaagtcaaaattggtgtcggacttc
agaaaggattttcaattctataaagttagggagataaataactaccaccatgcgcacgacgcttatct
taatgccgtcgtagggaccgcactcattaagaaatacccgaagctagaaagtgagtttgtgtatggtg
attacaaagtttatgacgtccgtaagatgatcgcgaaaagcgaacaggagataggcaaggctacagcc
aaatacttcttttattctaacattatgaatttctttaagacggaaatcactctggcaaacggagagat
acgcaaacgacctttaattgaaaccaatggggagacaggtgaaatcgtatgggataagggccgggact
tcgcgacggtgagaaaagttttgtccatgccccaagtcaacatagtaaagaaaactgaggtgcagacc
ggagggttttcaaaggaatcgattcttccaaaaaggaatagtgataagctcatcgctcgtaaaaagga
ctgggacccgaaaaagtacggtggcttcgatagccctacagttgcctattctgtcctagtagtggcaa
aagttgagaagggaaaatccaagaaactgaagtcagtcaaagaattattggggataacgattatggag
cgctcgtcttttgaaaagaaccccatcgacttccttgaggcgaaaggttacaaggaagtaaaaaagga
tctcataattaaactaccaaagtatagtctgtttgagttagaaaatggccgaaaacggatgttggcta
gcgccggagagcttcaaaaggggaacgaactcgcactaccgtctaaatacgtgaatttcctgtattta
gcgtcccattacgagaagttgaaaggttcacctgaagataacgaacagaagcaactttttgttgagca
gcacaaacattatctcgacgaaatcatagagcaaatttcggaattcagtaagagagtcatcctagctg
atgccaatctggacaaagtattaagcgcatacaacaagcacagggataaacccatacgtgagcaggcg
gaaaatattatccatttgtttactcttaccaacctcggcgctccagccgcattcaagtattttgacac
aacgatagatcgcaaacgatacacttctaccaaggaggtgctagacgcgacactgattcaccaatcca
tcacgggattatatgaaactcggatagatttgtcacagcttgggggtgactctggtggttctggagga
tctggtggttctactaatctgtcagatattattgaaaaggagaccggtaagcaactggttatccagga
atccatcctcatgctcccagaggaggtggaagaagtcattgggaacaagccggaaagcgatatactcg
tgcacaccgcctacgacgagagcaccgacgagaatgtcatgcttctgactagcgacgcccctgaatac
aagccttgggctctggtcatacaggatagcaacggtgagaacaagattaagatgctctctggtggttc
tggaggatctggtggttctactaatctgtcagatattattgaaaaggagaccggtaagcaactggtta
tccaggaatccatcctcatgctcccagaggaggtggaagaagtcattgggaacaagccggaaagcgat
atactcgtgcacaccgcctacgacgagagcaccgacgagaatgtcatgcttctgactagcgacgcccc
tgaatacaagccttgggctctggtcatacaggatagcaacggtgagaacaagattaagatgctctctg
gtggttctAAAAGGACGGCGGACGGATCAGAGTTCGAGAGTCCGAAAAAAAAACGAAAGGTCGAAtaa
BE4 Codon Optimization 1 nucleic acid sequence:
ATGTCATCCGAAACCGGGCCAGTGGCCGTAGACCCAACACTCAGGAGGCGGATAGAACCCCATGAGTT
TGAAGTGTTCTTCGACCCCAGAGAGCTGCGCAAAGAGACTTGCCTCCTGTATGAAATAAATTGGGGGG
GTCGCCATTCAATTTGGAGGCACACTAGCCAGAATACTAACAAACACGTGGAGGTAAATTTTATCGAG
AAGTTTACCACCGAAAGATACTTTTGCCCCAATACACGGTGTTCAATTACCTGGTTTCTGTCATGGAG
TCCATGTGGAGAATGTAGTAGAGCGATAACTGAGTTCCTGTCTCGATATCCTCACGTCACGTTGTTTA
TATACATCGCTCGGCTTTATCACCATGCGGACCCGCGGAACAGGCAAGGTCTTCGGGACCTCATATCC
TCTGGGGTGACCATCCAGATAATGACGGAGCAAGAGAGCGGATACTGCTGGCGAAACTTTGTTAACTA
CAGCCCAAGCAATGAGGCACACTGGCCTAGATATCCGCATCTCTGGGTTCGACTGTATGTCCTTGAAC
TGTACTGCATAATTCTGGGACTTCCGCCATGCTTGAACATTCTGCGGCGGAAACAACCACAGCTGACC
TTTTTCACGATTGCTCTCCAAAGTTGTCACTACCAGCGATTGCCACCCCACATCTTGTGGGCTACTGG
ACTCAAGTCTGGAGGAAGTTCAGGCGGAAGCAGCGGGTCTGAAACGCCCGGAACCTCAGAGAGCGCAA
CGCCCGAAAGCTCTGGAGGGTCAAGTGGTGGTAGTGATAAGAAATACTCCATCGGCCTCGCCATCGGT
ACGAATTCTGTCGGTTGGGCCGTTATCACCGATGAGTACAAGGTCCCTTCTAAGAAATTCAAGGTTTT
GGGCAATACAGACCGCCATTCTATAAAAAAAAACCTGATCGGCGCCCTTTTGTTTGACAGTGGTGAGA
CTGCTGAAGCGACTCGCCTGAAGCGAACTGCCAGGAGGCGGTATACGAGGCGAAAAAACCGAATTTGT
TACCTCCAGGAGATTTTCTCAAATGAAATGGCCAAGGTAGATGATAGTTTTTTTCACCGCTTGGAAGA
AAGTTTTCTCGTTGAGGAGGACAAAAAGCACGAGAGGCACCCAATCTTTGGCAACATAGTCGATGAGG
TCGCATACCATGAGAAATATCCTACGATCTATCATCTCCGCAAGAAGCTGGTCGATAGCACGGATAAA
GCTGACCTCCGGCTGATCTACCTTGCTCTTGCTCACATGATTAAATTCAGGGGCCATTTCCTGATAGA
AGGAGACCTCAATCCCGACAATTCTGATGTCGACAAACTGTTTATTCAGCTCGTTCAGACCTATAATC
AACTCTTTGAGGAGAACCCCATCAATGCTTCAGGGGTGGACGCAAAGGCCATTTTGTCCGCGCGCTTG
AGTAAATCACGACGCCTCGAGAATTTGATAGCTCAACTGCCGGGTGAGAAGAAAAACGGGTTGTTTGG
GAATCTCATAGCGTTGAGTTTGGGACTTACGCCAAACTTTAAGTCTAACTTTGATTTGGCCGAAGATG
CCAAATTGCAGCTGTCCAAAGATACCTATGATGACGACTTGGATAACCTTCTTGCGCAGATTGGTGAC
CAATACGCGGATCTGTTTCTTGCCGCAAAAAATCTGTCCGACGCCATACTCTTGTCCGATATACTGCG
CGTCAATACTGAGATAACTAAGGCTCCCCTCAGCGCGTCCATGATTAAAAGATACGATGAGCACCACC
AAGATCTCACTCTGTTGAAAGCCCTGGTTCGCCAGCAGCTTCCAGAGAAGTATAAGGAGATATTTTTC
GACCAATCTAAAAACGGCTATGCGGGTTACATTGACGGTGGCGCCTCTCAAGAAGAATTCTACAAGTT
TATAAAGCCGATACTTGAGAAAATGGACGGTACAGAGGAATTGTTGGTTAAGCTCAATCGCGAGGACT
TGTTGAGAAAGCAGCGCACATTTGACAATGGTAGTATTCCACACCAGATTCATCTGGGCGAGTTGCAT
GCCATTGTTAGAAGACAAGAAGATTTTTATCCGTTTCTGAAAGATAACAGAGAAAAGATTGAAAAGAT
ACTTACCTTTCGCATACCGTATTATGTAGGTCCCCTGGCTAGAGGGAACAGTCGCTTCGCTTGGATGA
CTCGAAAATCAGAAGAAACAATAACCCCCTGGAATTTTGAAGAAGTGGTAGATAAAGGTGCGAGTGCC
CAATCTTTTATTGAGCGGATGACAAATTTTGACAAGAATCTGCCTAACGAAAAGGTGCTTCCCAAGCA
TTCCCTTTTGTATGAATACTTTACAGTATATAATGAACTGACTAAAGTGAAGTACGTTACCGAGGGGA
TGCGAAAGCCAGCTTTTCTCAGTGGCGAGCAGAAAAAAGCAATAGTTGACCTGCTGTTCAAGACGAAT
AGGAAGGTTACCGTCAAACAGCTCAAAGAAGATTACTTTAAAAAGATCGAATGTTTTGATTCAGTTGA
GATAAGCGGAGTAGAGGATAGATTTAACGCAAGTCTTGGAACTTATCATGACCTTTTGAAGATCATCA
AGGATAAAGATTTTTTGGACAACGAGGAGAATGAAGATATCCTGGAAGATATAGTACTTACCTTGACG
CTTTTTGAAGATCGAGAGATGATCGAGGAGCGACTTAAGACGTACGCACATCTCTTTGACGATAAGGT
TATGAAACAATTGAAACGCCGGCGGTATACTGGCTGGGGCAGGCTTTCTCGAAAGCTGATTAATGGTA
TCCGCGATAAGCAGTCTGGAAAGACAATCCTTGACTTTCTGAAAAGTGATGGATTTGCAAATAGAAAC
TTTATGCAGCTTATACATGATGACTCTTTGACGTTCAAGGAAGACATCCAGAAGGCACAGGTATCCGG
CCAAGGGGATAGCCTCCATGAACACATAGCCAACCTGGCCGGCTCACCAGCTATTAAAAAGGGAATAT
TGCAAACCGTTAAGGTTGTTGACGAACTCGTTAAGGTTATGGGCCGACACAAACCAGAGAATATCGTG
ATTGAGATGGCTAGGGAGAATCAGACCACTCAAAAAGGTCAGAAAAATTCTCGCGAAAGGATGAAGCG
AATTGAAGAGGGAATCAAAGAACTTGGCTCTCAAATTTTGAAAGAGCACCCGGTAGAAAACACTCAGC
TGCAGAATGAAAAGCTGTATCTGTATTATCTGCAGAATGGTCGAGATATGTACGTTGATCAGGAGCTG
GATATCAATAGGCTCAGTGACTACGATGTCGACCACATCGTTCCTCAATCTTTCCTGAAAGATGACTC
TATCGACAACAAAGTGTTGACGCGATCAGATAAGAACCGGGGAAAATCCGACAATGTACCCTCAGAAG
AAGTTGTCAAGAAGATGAAAAACTATTGGAGACAATTGCTGAACGCCAAGCTCATAACACAACGCAAG
TTCGATAACTTGACGAAAGCCGAAAGAGGTGGGTTGTCAGAATTGGACAAAGCTGGCTTTATTAAGCG
CCAATTGGTGGAGACCCGGCAGATTACGAAACACGTAGCACAAATTTTGGATTCACGAATGAATACCA
AATACGACGAAAACGACAAATTGATACGCGAGGTGAAAGTGATTACGCTTAAGAGTAAGTTGGTTTCC
GATTTCAGGAAGGATTTTCAGTTTTACAAAGTAAGAGAAATAAACAACTACCACCACGCCCATGATGC
TTACCTCAACGCGGTAGTTGGCACAGCTCTTATCAAAAAATATCCAAAGCTGGAAAGCGAGTTCGTTT
ACGGTGACTATAAAGTATACGACGTTCGGAAGATGATAGCCAAATCAGAGCAGGAAATTGGGAAGGCA
ACCGCAAAATACTTCTTCTATTCAAACATCATGAACTTCTTTAAGACGGAGATTACGCTCGCGAACGG
CGAAATACGCAAGAGGCCCCTCATAGAGACTAACGGCGAAACCGGGGAGATCGTATGGGACAAAGGAC
GGGACTTTGCGACCGTTAGAAAAGTACTTTCAATGCCACAAGTGAATATTGTTAAAAAGACAGAAGTA
CAAACAGGGGGGTTCAGTAAGGAATCCATTTTGCCCAAGCGGAACAGTGATAAATTGATAGCAAGGAA
AAAAGATTGGGACCCTAAGAAGTACGGTGGTTTCGACTCTCCTACCGTTGCATATTCAGTCCTTGTAG
TTGCGAAAGTGGAAAAGGGGAAAAGTAAGAAGCTTAAGAGTGTTAAAGAGCTTCTGGGCATAACCATA
ATGGAACGGTCTAGCTTCGAGAAAAATCCAATTGACTTTCTCGAGGCTAAAGGTTACAAGGAGGTAAA
AAAGGACCTGATAATTAAACTCCCAAAGTACAGTCTCTTCGAGTTGGAGAATGGGAGGAAGAGAATGT
TGGCATCTGCAGGGGAGCTCCAAAAGGGGAACGAGCTGGCTCTGCCTTCAAAATACGTGAACTTTCTG
TACCTGGCCAGCCACTACGAGAAACTCAAGGGTTCTCCTGAGGATAACGAGCAGAAACAGCTGTTTGT
AGAGCAGCACAAGCATTACCTGGACGAGATAATTGAGCAAATTAGTGAGTTCTCAAAAAGAGTAATCC
TTGCAGACGCGAATCTGGATAAAGTTCTTTCCGCCTATAATAAGCACCGGGACAAGCCTATACGAGAA
CAAGCCGAGAACATCATTCACCTCTTTACCCTTACTAATCTGGGCGCGCCGGCCGCCTTCAAATACTT
CGACACCACGATAGACAGGAAAAGGTATACGAGTACCAAAGAAGTACTTGACGCCACTCTCATCCACC
AGTCTATAACAGGGTTGTACGAAACGAGGATAGATTTGTCCCAGCTCGGCGGCGACTCAGGAGGGTCA
GGCGGCTCCGGTGGATCAACGAATCTTTCCGACATAATCGAGAAAGAAACCGGCAAACAGTTGGTGAT
CCAAGAATCAATCCTGATGCTGCCTGAAGAAGTAGAAGAGGTGATTGGCAACAAACCTGAGTCTGACA
TTCTTGTCCACACCGCGTATGACGAGAGCACGGACGAGAACGTTATGCTTCTCACTAGCGACGCCCCT
GAGTATAAACCATGGGCGCTGGTCATCCAAGATTCCAATGGGGAAAACAAGATTAAGATGCTTAGTGG
TGGGTCTGGAGGGAGCGGTGGGTCCACGAACCTCAGCGACATTATTGAAAAAGAGACTGGTAAACAAC
TTGTAATACAAGAGTCTATTCTGATGTTGCCTGAAGAGGTGGAGGAGGTGATTGGGAACAAACCGGAG
TCTGATATACTTGTTCATACCGCCTATGACGAATCTACTGATGAGAATGTGATGCTTTTaACGTCAGA
CGCTCCCGAGTACAAACCCTGGGCTCTGGTGATTCAGGACAGCAATGGTGAGAATAAGATTAAAATGT
TGAGTGGGGGCTCAAAGCGCACGGCTGACGGTAGCGAATTTGAGAGCCCCAAAAAAAAACGAAAGGTC
GAAtaa
BE4 Codon Optimization 2 nucleic acid sequence:
ATGAGCAGCGAGACAGGCCCTGTGGCTGTGGATCCTACACTGCGGAGAAGAATCGAGCCCCACGAGTT
CGAGGTGTTCTTCGACCCCAGAGAGCTGCGGAAAGAGACATGCCTGCTGTACGAGATCAACTGGGGCG
GCAGACACTCTATCTGGCGGCACACAAGCCAGAACACCAACAAGCACGTGGAAGTGAACTTTATCGAG
AAGTTTACGACCGAGCGGTACTTCTGCCCCAACACCAGATGCAGCATCACCTGGTTTCTGAGCTGGTC
CCCTTGCGGCGAGTGCAGCAGAGCCATCACCGAGTTTCTGTCCAGATATCCCCACGTGACCCTGTTCA
TCTATATCGCCCGGCTGTACCACCACGCCGATCCTAGAAATAGACAGGGACTGCGCGACCTGATCAGC
AGCGGAGTGACCATCCAGATCATGACCGAGCAAGAGAGCGGCTACTGCTGGCGGAACTTCGTGAACTA
CAGCCCCAGCAACGAAGCCCACTGGCCTAGATATCCTCACCTGTGGGTCCGACTGTACGTGCTGGAAC
TGTACTGCATCATCCTGGGCCTGCCTCCATGCCTGAACATCCTGAGAAGAAAGCAGCCTCAGCTGACC
TTCTTCACAATCGCCCTGCAGAGCTGCCACTACCAGAGACTGCCTCCACACATCCTGTGGGCCACCGG
ACTTAAGAGCGGAGGATCTAGCGGCGGCTCTAGCGGATCTGAGACACCTGGCACAAGCGAGTCTGCCA
CACCTGAGAGTAGCGGCGGATCTTCTGGCGGCTCCGACAAGAAGTACTCTATCGGACTGGCCATCGGC
ACCAACTCTGTTGGATGGGCCGTGATCACCGACGAGTACAAGGTGCCCAGCAAGAAATTCAAGGTGCT
GGGCAACACCGACCGGCACAGCATCAAGAAGAATCTGATCGGCGCCCTGCTGTTCGACTCTGGCGAAA
CAGCCGAAGCCACCAGACTGAAGAGAACCGCCAGGCGGAGATACACCCGGCGGAAGAACCGGATCTGC
TACCTGCAAGAGATCTTCAGCAACGAGATGGCCAAGGTGGACGACAGCTTCTTCCACAGACTGGAAGA
GTCCTTCCTGGTGGAAGAGGACAAGAAGCACGAGCGGCACCCCATCTTCGGCAACATCGTGGATGAGG
TGGCCTACCACGAGAAGTACCCCACCATCTACCACCTGAGAAAGAAACTGGTGGACAGCACCGACAAG
GCCGACCTGAGACTGATCTACCTGGCTCTGGCCCACATGATCAAGTTCCGGGGCCACTTTCTGATCGA
GGGCGATCTGAACCCCGACAACAGCGACGTGGACAAGCTGTTCATCCAGCTGGTGCAGACCTACAACC
AGCTGTTCGAGGAAAACCCCATCAACGCCTCTGGCGTGGACGCCAAGGCTATCCTGTCTGCCAGACTG
AGCAAGAGCAGAAGGCTGGAAAACCTGATCGCCCAGCTGCCTGGCGAGAAGAAGAATGGCCTGTTCGG
CAACCTGATTGCCCTGAGCCTGGGACTGACCCCTAACTTCAAGAGCAACTTCGACCTGGCCGAGGATG
CCAAACTGCAGCTGAGCAAGGACACCTACGACGACGACCTGGACAATCTGCTGGCCCAGATCGGCGAT
CAGTACGCCGACTTGTTTCTGGCCGCCAAGAACCTGTCCGACGCCATCCTGCTGAGCGATATCCTGAG
AGTGAACACCGAGATCACAAAGGCCCCTCTGAGCGCCTCTATGATCAAGAGATACGACGAGCACCACC
AGGATCTGACCCTGCTGAAGGCCCTCGTTAGACAGCAGCTGCCAGAGAAGTACAAAGAGATTTTCTTC
GATCAGTCCAAGAACGGCTACGCCGGCTACATTGATGGCGGAGCCAGCCAAGAGGAATTCTACAAGTT
CATCAAGCCCATCCTGGAAAAGATGGACGGCACCGAGGAACTGCTGGTCAAGCTGAACAGAGAGGACC
TGCTGCGGAAGCAGCGGACCTTCGACAATGGCTCTATCCCTCACCAGATCCACCTGGGAGAGCTGCAC
GCCATTCTGCGGAGACAAGAGGACTTTTACCCATTCCTGAAGGACAACCGGGAAAAGATCGAGAAGAT
CCTGACCTTCAGGATCCCCTACTACGTGGGACCACTGGCCAGAGGCAATAGCAGATTCGCCTGGATGA
CCAGAAAGAGCGAGGAAACCATCACACCCTGGAACTTCGAGGAAGTGGTGGACAAGGGCGCCAGCGCT
CAGTCCTTCATCGAGCGGATGACCAACTTCGATAAGAACCTGCCTAACGAGAAGGTGCTGCCCAAGCA
CTCCCTGCTGTATGAGTACTTCACCGTGTACAACGAGCTGACCAAAGTGAAATACGTGACCGAGGGAA
TGAGAAAGCCCGCCTTTCTGAGCGGCGAGCAGAAAAAGGCCATTGTGGATCTGCTGTTCAAGACCAAC
CGGAAAGTGACCGTGAAGCAGCTGAAAGAGGACTACTTCAAGAAAATCGAGTGCTTCGACAGCGTGGA
AATCAGCGGCGTGGAAGATCGGTTCAATGCCAGCCTGGGCACATACCACGACCTGCTGAAAATTATCA
AGGACAAGGACTTCCTGGACAACGAAGAGAACGAGGACATTCTCGAGGACATCGTGCTGACCCTGACA
CTGTTTGAGGACAGAGAGATGATCGAGGAACGGCTGAAAACATACGCCCACCTGTTCGACGACAAAGT
GATGAAGCAACTGAAGCGGAGGCGGTACACAGGCTGGGGCAGACTGTCTCGGAAGCTGATCAACGGCA
TCCGGGATAAGCAGTCCGGCAAGACAATCCTGGATTTCCTGAAGTCCGACGGCTTCGCCAACAGAAAC
TTCATGCAGCTGATCCACGACGACAGCCTGACCTTTAAAGAGGACATCCAGAAAGCCCAGGTGTCCGG
CCAAGGCGATTCTCTGCACGAGCACATTGCCAACCTGGCCGGATCTCCCGCCATTAAGAAGGGCATCC
TGCAGACAGTGAAGGTGGTGGACGAGCTTGTGAAAGTGATGGGCAGACACAAGCCCGAGAACATCGTG
ATCGAAATGGCCAGAGAGAACCAGACCACACAGAAGGGCCAGAAGAACAGCCGCGAGAGAATGAAGCG
GATCGAAGAGGGCATCAAAGAGCTGGGCAGCCAGATCCTGAAAGAACACCCCGTGGAAAACACCCAGC
TGCAGAACGAGAAGCTGTACCTGTACTACCTGCAGAATGGACGGGATATGTACGTGGACCAAGAGCTG
GACATCAACCGGCTGAGCGACTACGATGTGGACCATATCGTGCCCCAGAGCTTTCTGAAGGACGACTC
CATCGATAACAAGGTCCTGACCAGAAGCGACAAGAACCGGGGCAAGAGCGATAACGTGCCCTCCGAAG
AGGTGGTCAAGAAGATGAAGAACTACTGGCGACAGCTGCTGAACGCCAAGCTGATTACCCAGCGGAAG
TTCGATAACCTGACCAAGGCCGAGAGAGGCGGCCTGAGCGAACTTGATAAGGCCGGCTTCATTAAGCG
GCAGCTGGTGGAAACCCGGCAGATCACCAAACACGTGGCACAGATTCTGGACTCCCGGATGAACACTA
AGTACGACGAGAATGACAAGCTGATCCGGGAAGTGAAAGTCATCACCCTGAAGTCTAAGCTGGTGTCC
GATTTCCGGAAGGATTTCCAGTTCTACAAAGTGCGGGAAATCAACAACTACCATCACGCCCACGACGC
CTACCTGAATGCCGTTGTTGGAACAGCCCTGATCAAGAAGTATCCCAAGCTGGAAAGCGAGTTCGTGT
ACGGCGACTACAAGGTGTACGACGTGCGGAAGATGATCGCCAAGAGCGAACAAGAGATCGGCAAGGCT
ACCGCCAAGTACTTTTTCTACAGCAACATCATGAACTTTTTCAAGACAGAGATCACCCTGGCCAACGG
CGAGATCCGGAAAAGACCCCTGATCGAGACAAACGGCGAAACCGGGGAGATCGTGTGGGATAAGGGCA
GAGATTTTGCCACAGTGCGGAAAGTGCTGAGCATGCCCCAAGTGAATATCGTGAAGAAAACCGAGGTG
CAGACAGGCGGCTTCAGCAAAGAGTCTATCCTGCCTAAGCGGAACAGCGATAAGCTGATCGCCAGAAA
GAAGGACTGGGACCCTAAGAAGTACGGCGGCTTCGATAGCCCTACCGTGGCCTATTCTGTGCTGGTGG
TGGCCAAAGTGGAAAAGGGCAAGTCCAAAAAGCTCAAGAGCGTGAAAGAGCTGCTGGGGATCACCATC
ATGGAAAGAAGCAGCTTTGAGAAGAACCCGATCGACTTTCTGGAAGCCAAGGGCTACAAAGAAGTCAA
GAAGGACCTCATCATCAAGCTCCCCAAGTACAGCCTGTTCGAGCTGGAAAATGGCCGGAAGCGGATGC
TGGCCTCAGCAGGCGAACTGCAGAAAGGCAATGAACTGGCCCTGCCTAGCAAATACGTCAACTTCCTG
TACCTGGCCAGCCACTATGAGAAGCTGAAGGGCAGCCCCGAGGACAATGAGCAAAAGCAGCTGTTTGT
GGAACAGCACAAGCACTACCTGGACGAGATCATCGAGCAGATCAGCGAGTTCTCCAAGAGAGTGATCC
TGGCCGACGCTAACCTGGATAAGGTGCTGTCTGCCTATAACAAGCACCGGGACAAGCCTATCAGAGAG
CAGGCCGAGAATATCATCCACCTGTTTACCCTGACCAACCTGGGAGCCCCTGCCGCCTTCAAGTACTT
CGACACCACCATCGACCGGAAGAGGTACACCAGCACCAAAGAGGTGCTGGACGCCACACTGATCCACC
AGTCTATCACCGGCCTGTACGAAACCCGGATCGACCTGTCTCAGCTCGGCGGCGATTCTGGTGGTTCT
GGCGGAAGTGGCGGATCCACCAATCTGAGCGACATCATCGAAAAAGAGACAGGCAAGCAGCTCGTGAT
CCAAGAATCCATCCTGATGCTGCCTGAAGAGGTTGAGGAAGTGATCGGCAACAAGCCTGAGTCCGACA
TCCTGGTGCACACCGCCTACGATGAGAGCACCGATGAGAACGTCATGCTGCTGACAAGCGACGCCCCT
GAGTACAAGCCTTGGGCTCTCGTGATTCAGGACAGCAATGGGGAGAACAAGATCAAGATGCTGAGCGG
AGGTAGCGGAGGCAGTGGCGGAAGCACAAACCTGTCTGATATCATTGAAAAAGAAACCGGGAAGCAAC
TGGTCATTCAAGAGTCCATTCTCATGCTCCCGGAAGAAGTCGAGGAAGTCATTGGAAACAAACCCGAG
AGCGATATTCTGGTCCACACAGCCTATGACGAGTCTACAGACGAAAACGTGATGCTCCTGACCTCTGA
CGCTCCCGAGTATAAGCCCTGGGCACTTGTTATCCAGGACTCTAACGGGGAAAACAAAATCAAAATGT
TGTCCGGCGGCAGCAAGCGGACAGCCGATGGATCTGAGTTCGAGAGCCCCAAGAAGAAACGGAAGGTg
GAGtaa

[0072] By “base editing activity” is meant acting to chemically alter a base within a polynucleotide. In one embodiment, a first base is converted to a second base. In one embodiment, the base editing activity is cytidine deaminase activity, e.g., converting target CG to TA. In another embodiment, the base editing activity is adenosine or adenine deaminase activity, e.g., converting A•T to G•C. In another embodiment, the base editing activity is cytidine deaminase activity, e.g., converting target C•G to T•A and adenosine or adenine deaminase activity, e.g., converting A•T to G•C.

[0073] The term “base editor system” refers to a system for editing a nucleobase of a target nucleotide sequence. In various embodiments, the base editor (BE) system comprises (1) a polynucleotide programmable nucleotide binding domain, a deaminase domain (e.g., cytidine deaminase or adenosine deaminase) for deaminating nucleobases in the target nucleotide sequence; and (2) one or more guide polynucleotides (e.g., guide RNA) in conjunction with the polynucleotide programmable nucleotide binding domain. In various embodiments, the base editor (BE) system comprises a nucleobase editor domain selected from an adenosine deaminase or a cytidine deaminase, and a domain having nucleic acid sequence specific binding activity. In some embodiments, the base editor system comprises (1) a base editor (BE) comprising a polynucleotide programmable DNA binding domain and a deaminase domain for deaminating one or more nucleobases in a target nucleotide sequence; and (2) one or more guide RNAs in conjunction with the polynucleotide programmable DNA binding domain. In some embodiments, the polynucleotide programmable nucleotide binding domain is a polynucleotide programmable DNA binding domain. In some embodiments, the base editor is a cytidine base editor (CBE). In some embodiments, the base editor is an adenine or adenosine base editor (ABE). In some embodiments, the base editor is an adenine or adenosine base editor (ABE) or a cytidine base editor (CBE).

[0074] The term “Cas9” or “Cas9 domain” refers to an RNA guided nuclease comprising a Cas9 protein, or a fragment thereof (e.g., a protein comprising an active, inactive, or partially active DNA cleavage domain of Cas9, and/or the gRNA binding domain of Cas9). A Cas9 nuclease is also referred to sometimes as a casnl nuclease or a CRISPR (clustered regularly interspaced short palindromic repeat) associated nuclease. An exemplary Cas9, is Streptococcus pyogenes Cas9 (spCas9), the amino acid sequence of which is provided below:

MDKKYSIGLDIGTNSVGWAVITDDYKVPSKKFKVLGNTDRHSIKKNLIG
ALLFGSGETAEATRLKRTARRRYTRRKNRICYLQEIFSNEMAKVDDSFF
HRLEESFLVEEDKKHERHPIFGNIVDEVAYHEKYPTIYHLRKKLADSTD
KADLRLIYLALAHMIKFRGHFLIEGDLNPDNSDVDKLFIQLVQIYNQLF
EENPINASRVDAKAILSARLSKSRRLENLIAQLPGEKRNGLFGNLIALS
LGLTPNFKSNFDLAEDAKLQLSKDTYDDDLDNLLAQIGDQYADLFLAAK
NLSDAILLSDILRVNSEITKAPLSASMIKRYDEHHQDLTLLKALVRQQL
PEKYKEIFFDQSKNGYAGYIDGGASQEEFYKFIKPILEKMDGTEELLVK
LNREDLLRKQRTFDNGSIPHQIHLGELHAILRRQEDFYPFLKDNREKIE
KILTFRIPYYVGPLARGNSRFAWMTRKSEETITPWNFEEVVDKGASAQS
FIERMTNFDKNLPNEKVLPKHSLLYEYFTVYNELTKVKYVTEGMRKPAF
LSGEQKKAIVDLLFKTNRKVTVKQLKEDYFKKIECFDSVEISGVEDRFN
ASLGAYHDLLKIIKDKDFLDNEENEDILEDIVLTLTLFEDRGMIEERLK
TYAHLFDDKVMKQLKRRRYTGWGRLSRKLINGIRDKQSGKTILDFLKSD
GFANRNFMQLIHDDSLTFKEDIQKAQVSGQGHSLHEQIANLAGSPAIKK
GILQTVKIVDELVKVMGHKPENIVIEMARENQTTQKGQKNSRERMKRIE
EGIKELGSQILKEHPVENTQLQNEKLYLYYLQNGRDMYVDQELDINRLS
DYDVDHIVPQSFIKDDSIDNKVLTRSDKNRGKSDNVPSEEVVKKMKNYW
RQLLNAKLITQRKFDNLTKAERGGLSELDKAGFIKRQLVETRQITKHVA
QILDSRMNTKYDENDKLIREVKVITLKSKLVSDFRKDFQFYKVREINNY
HHAHDAYLNAVVGTALIKKYPKLESEFVYGDYKVYDVRKMIAKSEQEIG
KATAKYFFYSNIMNFFKTEITLANGEIRKRPLIETNGETGEIVWDKGRD
FATVRKVLSMPQVNIVKKTEVQTGGFSKESILPKRNSDKLIARKKDWDP
KKYGGFDSPTVAYSVLVVAKVEKGKSKKLKSVKELLGITIMERSSFEKN
PIDFLEAKGYKEVKKDLIIKLPKYSLFELENGRKRMLASAGELQKGNEL
ALPSKYVNFLYLASHYEKLKGSPEDNEQKQLFVEQHKHYLDEIIEQISE
FSKRVILADANLDKVLSAYNKHRDKPIREQAENIIHLFTLTNLGAPAAF
KYFDTTIDRKRYTSTKEVLDATLIHQSITGLYETRIDLSQLGGD

(single underline: HNH domain; double underline: RuvC domain)

[0075] The term “conservative amino acid substitution” or “conservative mutation” refers to the replacement of one amino acid by another amino acid with a common property. A functional way to define common properties between individual amino acids is to analyze the normalized frequencies of amino acid changes between corresponding proteins of homologous organisms (Schulz, G. E. and Schirmer, R. H., Principles of Protein Structure, Springer-Verlag, New York (1979)). According to such analyses, groups of amino acids can be defined where amino acids within a group exchange preferentially with each other, and therefore resemble each other most in their impact on the overall protein structure (Schulz, G. E. and Schirmer, R. H., supra). Non-limiting examples of conservative mutations include amino acid substitutions of amino acids, for example, lysine for arginine and vice versa such that a positive charge can be maintained; glutamic acid for aspartic acid and vice versa such that a negative charge can be maintained; serine for threonine such that a free —OH can be maintained; and glutamine for asparagine such that a free —NH₂ can be maintained.

[0076] The term “coding sequence” or “protein coding sequence” as used interchangeably herein refers to a segment of a polynucleotide that codes for a protein. Coding sequences can also be referred to as open reading frames. The region or sequence is bounded nearer the 5′ end by a start codon and nearer the 3′ end with a stop codon. Stop codons useful with the base editors described herein include the following:

| | |
|---|---|
| Glutamine | CAG → TAG Stop codon |
| | CAA → TAA |
| Arginine | CGA → TGA |
| Tryptophan | TGG → TGA |
| | TGG → TAG |
| | TGG → TAA |

[0077] As used herein, the terms “condition” and “conditioning” refer to processes by which a patient is prepared for receipt of a transplant containing hematopoietic stem cells. Such procedures promote the engraftment of a hematopoietic stem cell transplant (for instance, as inferred from a sustained increase in the quantity of viable hematopoietic stem cells within a blood sample isolated from a patient following a conditioning procedure and subsequent hematopoietic stem cell transplantation). According to the methods described herein, a patient may be conditioned for hematopoietic stem cell transplant therapy by administration to the patient of an antibody or antigen-binding fragment thereof capable of binding an antigen expressed by hematopoietic stem cells, such as CD117, CXCR4, CD135, CD90, CD45, and/or CD34. Such antibodies are expected to act via complement-mediated cytotoxicity and antibody-dependent cell-mediated cytotoxicity. As described herein, the transplanted cells have been edited so that the antibody no longer binds the antigen (e.g., CD117, CXCR4, CD135, CD90, CD45, and/or CD34). Administration of an antibody, antigen-binding fragment thereof, drug-antibody conjugate, or chimeric antigen receptor expressing T-cell (CAR-T) capable of binding one or more antigens (e.g., CD117, CXCR4, CD135, CD90, CD45, CD34) to a patient in need of hematopoietic stem cell transplant therapy can promote the engraftment of a hematopoietic stem cell graft, for example, by selectively depleting endogenous hematopoietic stem cells, thereby creating a vacancy filled by an exogenous hematopoietic stem cell transplant.

[0078] By “cytidine deaminase” is meant a polypeptide or fragment thereof capable of catalyzing a deamination reaction that converts an amino group to a carbonyl group. In one embodiment, the cytidine deaminase converts cytosine to uracil or 5-methylcytosine to thymine. PmCDA1, which is derived from Petromyzon marinus (Petromyzon marinus cytosine deaminase 1, “PmCDA1”), AID (Activation-induced cytidine deaminase; AICDA), which is derived from a mammal (e.g., human, swine, bovine, horse, monkey etc.), and APOBEC are exemplary cytidine deaminases.

[0079] The term “deaminase” or “deaminase domain,” as used herein, refers to a protein or enzyme that catalyzes a deamination reaction. In some embodiments, the deaminase or deaminase domain is a cytidine deaminase, catalyzing the hydrolytic deamination of cytidine or deoxycytidine to uridine or deoxyuridine, respectively. In some embodiments, the deaminase or deaminase domain is a cytosine deaminase, catalyzing the hydrolytic deamination of cytosine to uracil. In some embodiments, the deaminase is an adenosine deaminase, which catalyzes the hydrolytic deamination of adenine to hypoxanthine. In some embodiments, the deaminase is an adenosine deaminase, which catalyzes the hydrolytic deamination of adenosine or adenine (A) to inosine (I). In some embodiments, the deaminase or deaminase domain is an adenosine deaminase, catalyzing the hydrolytic deamination of adenosine or deoxyadenosine to inosine or deoxyinosine, respectively. In some embodiments, the adenosine deaminase catalyzes the hydrolytic deamination of adenosine in deoxyribonucleic acid (DNA). The adenosine deaminase (e.g., engineered adenosine deaminase, evolved adenosine deaminase) provided herein can be from any organism, such as a bacterium. In some embodiments, the adenosine deaminase is from a bacterium, such as E. coli, S. aureus, S. typhi, S. putrefaciens, H influenzae, or C. crescentus. In some embodiments, the adenosine deaminase is a TadA deaminase. In some embodiments, the deaminase or deaminase domain is a variant of a naturally occurring deaminase from an organism, such as a human, chimpanzee, gorilla, monkey, cow, dog, rat, or mouse. In some embodiments, the deaminase or deaminase domain does not occur in nature. For example, in some embodiments, the deaminase or deaminase domain is at least 50%, at least 55%, at least 60%, at least 65%, at least 70%, at least 75% at least 80%, at least 85%, at least 90%, at least 91%, at least 92%, at least 93%, at least 94%, at least 95%, at least 96%, at least 97%, at least 98%, at least 99%, at least 99.1%, at least 99.2%, at least 99.3%, at least 99.4%, at least 99.5%, at least 99.6%, at least 99.7%, at least 99.8%, or at least 99.9% identical to a naturally occurring deaminase.

[0080] “Detect” refers to identifying the presence, absence or amount of the analyte to be detected. In one embodiment, a sequence alteration in a polynucleotide or polypeptide is detected. In another embodiment, the presence of indels is detected.

[0081] By “detectable label” is meant a composition that when linked to a molecule of interest renders the latter detectable, via spectroscopic, photochemical, biochemical, immunochemical, or chemical means. For example, useful labels include radioactive isotopes, magnetic beads, metallic beads, colloidal particles, fluorescent dyes, electron-dense reagents, enzymes (for example, as commonly used in an enzyme linked immunosorbent assay (ELISA)), biotin, digoxigenin, or haptens.

[0082] By “disease” is meant any condition or disorder that damages or interferes with the normal function of a cell, tissue, or organ. Exemplary diseases include diseases amenable to treatment with hematopoietic stem cell transplantation, such as β-thalassemia, sickle cell disease (SCD), or adenosine deaminase deficiency.

[0083] By “effective amount” is meant the amount of an agent or active compound, e.g., a base editor as described herein, that is required to ameliorate the symptoms of a disease relative to an untreated patient or an individual without disease, i.e., a healthy individual, or is the amount of the agent or active compound sufficient to elicit a desired biological response. The effective amount of active compound(s) used to practice the present invention for therapeutic treatment of a disease varies depending upon the manner of administration, the age, body weight, and general health of the subject. Ultimately, the attending physician or veterinarian will decide the appropriate amount and dosage regimen. Such amount is referred to as an “effective” amount. In one embodiment, an effective amount is the amount of a base editor of the invention sufficient to introduce an alteration in a gene of interest in a cell (e.g., a cell in vitro or in vivo). In one embodiment, an effective amount is the amount of a base editor required to achieve a therapeutic effect. Such therapeutic effect need not be sufficient to alter a pathogenic gene in all cells of a subject, tissue or organ, but only to alter the pathogenic gene in about 1%, 5%, 10%, 25%, 50%, 75% or more of the cells present in a subject, tissue or organ. In one embodiment, an effective amount is sufficient to ameliorate one or more symptoms of a disease.

[0084] In some embodiments, an effective amount of a fusion protein provided herein, e.g., of a nucleobase editor comprising a nCas9 domain and a deaminase domain (e.g., adenosine deaminase, cytidine deaminase) refers to the amount that is sufficient to induce editing of a target site specifically bound and edited by the nucleobase editors described herein. As will be appreciated by the skilled artisan, the effective amount of an agent, e.g., a fusion protein, may vary depending on various factors as, for example, on the desired biological response, e.g., on the specific allele, genome, or target site to be edited, on the cell or tissue being targeted, and/or on the agent being used.

[0085] In some embodiments, an effective amount of a fusion protein provided herein, e.g., of a fusion protein comprising a nCas9 domain and a deaminase domain may refer to the amount of the fusion protein that is sufficient to induce editing of a target site specifically bound and edited by the fusion protein. As will be appreciated by the skilled artisan, the effective amount of an agent, e.g., a fusion protein, a nuclease, a hybrid protein, a protein dimer, a complex of a protein (or protein dimer) and a polynucleotide, or a polynucleotide, may vary depending on various factors as, for example, on the desired biological response, e.g., on the specific allele, genome, or target site to be edited, on the cell or tissue being targeted, and/or on the agent being used.

[0086] By “fragment” is meant a portion of a polypeptide or nucleic acid molecule. This portion contains, at least about 10%, 20%, 30%, 40%, 50%, 60%, 70%, 80%, or 90% of the entire length of the reference nucleic acid molecule or polypeptide. A fragment may contain 10, 20, 30, 40, 50, 60, 70, 80, 90, or 100, 200, 300, 400, 500, 600, 700, 800, 900, or 1000 nucleotides or amino acids.

[0087] By “guide RNA” or “gRNA” is meant a polynucleotide which is specific for a target sequence and can form a complex with a polynucleotide programmable nucleotide binding domain protein (e.g., Cas9 or Cpf1). In an embodiment, the guide polynucleotide is a guide RNA (gRNA). gRNAs can exist as a complex of two or more RNAs, or as a single RNA molecule. gRNAs that exist as a single RNA molecule may be referred to as single-guide RNAs (sgRNAs), although “gRNA” is used interchangeably to refer to guide RNAs that exist as either single molecules or as a complex of two or more molecules. Typically, gRNAs that exist as single RNA species comprise two domains: (1) a domain that shares homology to a target nucleic acid (e.g., and directs binding of a Cas9 complex to the target); and (2) a domain that binds a Cas9 protein. In some embodiments, domain (2) corresponds to a sequence known as a tracrRNA, and comprises a stem-loop structure. For example, in some embodiments, domain (2) is identical or homologous to a tracrRNA as provided in Jinek et al., Science 337:816-821(2012), the entire contents of which is incorporated herein by reference. Other examples of gRNAs (e.g., those including domain 2) can be found in US20160208288, entitled “Switchable Cas9 Nucleases and Uses Thereof,” and U.S. Pat. No. 9,737,604, entitled “Delivery System For Functional Nucleases,” the entire contents of each are hereby incorporated by reference in their entirety. In some embodiments, a gRNA comprises two or more of domains (1) and (2), and may be referred to as an “extended gRNA.” An extended gRNA will bind two or more Cas9 proteins and bind a target nucleic acid at two or more distinct regions, as described herein. The gRNA comprises a nucleotide sequence that complements a target site, which mediates binding of the nuclease/RNA complex to the target site, providing the sequence specificity of the nuclease:RNA complex.

[0088] As used herein, the term “hematopoietic stem cells” (“HSCs”) refers to immature blood cells having the capacity to self-renew and to differentiate into mature blood cells containing diverse lineages including but not limited to granulocytes (e.g., promyelocytes, neutrophils, eosinophils, basophils), erythrocytes (e.g., reticulocytes, erythrocytes), thrombocytes (e.g., megakaryoblasts, platelet producing megakaryocytes, platelets), monocytes (e.g., monocytes, macrophages), dendritic cells, microglia, osteoclasts, and lymphocytes (e.g., NK cells, B-cells and T-cells). Such cells may include CD34+ cells. CD34+ cells are immature cells that express the CD34 cell surface marker. In humans, CD34+ cells are believed to include a subpopulation of cells with the stem cell properties defined above, whereas in mice, HSCs are CD34-. In addition, HSCs also refer to long term repopulating HSCs (LT-HSC) and short term repopulating HSCs (ST-HSC). LT-HSCs and ST-HSCs are differentiated, based on functional potential and on cell surface marker expression. For example, human HSCs are CD34+, CD38-, CD45RA−, CD90+, CD49F+, and lin− (negative for mature lineage markers including CD2, CD3, CD4, CD7, CD8, CD10, CD11B, CD19, CD20, CD56, CD235A). In mice, bone marrow LT-HSCs are CD34−, SCA-1+, C-kit+, CD135−, Slamfl/CD150+, CD48−, and lin− (negative for mature lineage markers including Ter119, CD11b, Gr1, CD3, CD4, CD8, B220, IL7ra), whereas ST-HSCs are CD34+, SCA-1+, C-kit+, CD135−, Slamfl/CD150+, and lin− (negative for mature lineage markers including Ter119, CD11b, Gr1, CD3, CD4, CD8, B220, IL7ra). In addition, ST-HSCs are less quiescent and more proliferative than LT-HSCs under homeostatic conditions. However, LT-HSC have greater self renewal potential (i.e., they survive throughout adulthood, and can be serially transplanted through successive recipients), whereas ST-HSCs have limited self renewal (i.e., they survive for only a limited period of time, and do not possess serial transplantation potential). Any of these HSCs can be used in the methods described herein. ST-HSCs are particularly useful because they are highly proliferative and thus, can more quickly give rise to differentiated progeny.

[0089] As used herein, the term “hematopoietic stem cell functional potential” refers to the functional properties of hematopoietic stem cells which include 1) multi-potency (which refers to the ability to differentiate into multiple different blood lineages including, but not limited to, granulocytes (e.g., promyelocytes, neutrophils, eosinophils, basophils), erythrocytes (e.g., reticulocytes, erythrocytes), thrombocytes (e.g., megakaryoblasts, platelet producing megakaryocytes, platelets), monocytes (e.g., monocytes, macrophages), dendritic cells, microglia, osteoclasts, and lymphocytes (e.g., NK cells, B-cells and T-cells), 2) self-renewal (which refers to the ability of hematopoietic stem cells to give rise to daughter cells that have equivalent potential as the mother cell, and further that this ability can repeatedly occur throughout the lifetime of an individual without exhaustion), and 3) the ability of hematopoietic stem cells or progeny thereof to be reintroduced into a transplant recipient whereupon they home to the hematopoietic stem cell niche and re-establish productive and sustained hematopoiesis.”

[0090] By “heterodimer” is meant a fusion protein comprising two domains, such as a wild type TadA domain and a variant of TadA domain (e.g., TadA*8) or two variant TadA domains (e.g., TadA*7.10 and TadA*8 or two TadA*8 domains).

[0091] “Hybridization” means hydrogen bonding, which may be Watson-Crick, Hoogsteen or reversed Hoogsteen hydrogen bonding, between complementary nucleobases. For example, adenine and thymine are complementary nucleobases that pair through the formation of hydrogen bonds.

[0092] By “increases” is meant a positive alteration of at least 10%, 25%, 50%, 75%, or 100%.

[0093] The terms “inhibitor of base repair”, “base repair inhibitor”, “IBR” or their grammatical equivalents refer to a protein that is capable in inhibiting the activity of a nucleic acid repair enzyme, for example a base excision repair enzyme. In some embodiments, the IBR is an inhibitor of inosine base excision repair. Exemplary inhibitors of base repair include inhibitors of APE1, Endo III, Endo IV, Endo V, Endo VIII, Fpg, hOGGl, hNEILl, T7 Endol, T4PDG, UDG, hSMUG1, and hAAG. In some embodiments, the base repair inhibitor is an inhibitor of Endo V or hAAG. In some embodiments, the IBR is an inhibitor of Endo V or hAAG. In some embodiments, the IBR is a catalytically inactive EndoV or a catalytically inactive hAAG. In some embodiments, the base repair inhibitor is a catalytically inactive EndoV or a catalytically inactive hAAG. In some embodiments, the base repair inhibitor is uracil glycosylase inhibitor (UGI). UGI refers to a protein that is capable of inhibiting a uracil-DNA glycosylase base-excision repair enzyme. In some embodiments, a UGI domain comprises a wild-type UGI or a fragment of a wild-type UGI. In some embodiments, the UGI proteins provided herein include fragments of UGI and proteins homologous to a UGI or a UGI fragment. In some embodiments, the base repair inhibitor is an inhibitor of inosine base excision repair. In some embodiments, the base repair inhibitor is a “catalytically inactive inosine specific nuclease” or “dead inosine specific nuclease.” Without wishing to be bound by any particular theory, catalytically inactive inosine glycosylases (e.g., alkyl adenine glycosylase (AAG)) can bind inosine, but cannot create an abasic site or remove the inosine, thereby sterically blocking the newly formed inosine moiety from DNA damage/repair mechanisms. In some embodiments, the catalytically inactive inosine specific nuclease can be capable of binding an inosine in a nucleic acid but does not cleave the nucleic acid. Non-limiting exemplary catalytically inactive inosine specific nucleases include catalytically inactive alkyl adenosine glycosylase (AAG nuclease), for example, from a human, and catalytically inactive endonuclease V (EndoV nuclease), for example, from E. coli. In some embodiments, the catalytically inactive AAG nuclease comprises an E125Q mutation or a corresponding mutation in another AAG nuclease.

[0094] An “intein” is a fragment of a protein that is able to excise itself and join the remaining fragments (the exteins) with a peptide bond in a process known as protein splicing. Inteins are also referred to as “protein introns.” The process of an intein excising itself and joining the remaining portions of the protein is herein termed “protein splicing” or “intein-mediated protein splicing.” In some embodiments, an intein of a precursor protein (an intein containing protein prior to intein-mediated protein splicing) comes from two genes. Such intein is referred to herein as a split intein (e.g., split intein-N and split intein-C). For example, in cyanobacteria, DnaE, the catalytic subunit a of DNA polymerase III, is encoded by two separate genes, dnaE-n and dnaE-c. The intein encoded by the dnaE-n gene may be herein referred as “intein-N.” The intein encoded by the dnaE-c gene may be herein referred as “intein-C.”

[0095] Other intein systems may also be used. For example, a synthetic intein based on the dnaE intein, the Cfa-N (e.g., split intein-N) and Cfa-C (e.g., split intein-C) intein pair, has been described (e.g., in Stevens et al., J Am Chem Soc. 2016 Feb. 24; 138(7):2162-5, incorporated herein by reference). Non-limiting examples of intein pairs that may be used in accordance with the present disclosure include: Cfa DnaE intein, Ssp GyrB intein, Ssp DnaX intein, Ter DnaE3 intein, Ter ThyX intein, Rma DnaB intein and Cne Prp8 intein (e.g., as described in U.S. Pat. No. 8,394,604, incorporated herein by reference. Exemplary nucleotide and amino acid sequences of inteins are provided.

DnaE Intein-N DNA:
TGCCTGTCATACGAAACCGAGATACTGACAGTAGAATATGGCCTTCTGCC
AATCGGGAAGATTGTGGAGAAACGGATAGAATGCACAGTTTACTCTGTCG
ATAACAATGGTAACATTTATACTCAGCCAGTTGCCCAGTGGCACGACCGG
GGAGAGCAGGAAGTATTCGAATACTGTCTGGAGGATGGAAGTCTCATTAG
GGCCACTAAGGACCACAAATTTATGACAGTCGATGGCCAGATGCTGCCTA
TAGACGAAATCTTTGAGCGAGAGTTGGACCTCATGCGAGTTGACAACCTT
CCTAAT
DnaE Intein-N Protein:
CLSYETEILTVEYGLLPIGKIVEKRIECTVYSVDNNGNIYTQPVAQWHDR
GEQEVFEYCLEDGSLIRATKDHKFMTVDGQMLPIDEIFERELDLMRVDNL
PN
DnaE Intein-C DNA:
ATGATCAAGATAGCTACAAGGAAGTATCTTGGCAAACAAAACGTTTATGA
TATTGGAGTCGAAAGAGATCACAACTTTGCTCTGAAGAACGGATTCATAG
CTTCTAAT
Intein-C:
MIKIATRKYLGKQNVYDIGVERDHNFALKNGFIASN
Cfa-N DNA:
TGCCTGTCTTATGATACCGAGATACTTACCGTTGAATATGGCTTCTTGCC
TATTGGAAAGATTGTCGAAGAGAGAATTGAATGCACAGTATATACTGTAG
ACAAGAATGGTTTCGTTTACACACAGCCCATTGCTCAATGGCACAATCGC
GGCGAACAAGAAGTATTTGAGTACTGTCTCGAGGATGGAAGCATCATACG
AGCAACTAAAGATCATAAATTCATGACCACTGACGGGCAGATGTTGCCAA
TAGATGAGATATTCGAGCGGGGCTTGGATCTCAAACAAGTGGATGGATTG
CCA
Cfa-N Protein:
CLSYDTEILTVEYGFLPIGKIVEERIECTVYTVDKNGFVYTQPIAQWHNR
GEQEVFEYCLEDGSIIRATKDHKFMTTDGQMLPIDEIFERGLDLKQVDGL
P
Cfa-C DNA:
ATGAAGAGGACTGCCGATGGATCAGAGTTTGAATCTCCCAAGAAGAAGAG
GAAAGTAAAGATAATATCTCGAAAAAGTCTTGGTACCCAAAATGTCTATG
ATATTGGAGTGGAGAAAGATCACAACTTCCTTCTCAAGAACGGTCTCGTA
GCCAGCAAC
Cfa-C Protein:
MKRTADGSEFESPKKKRKVKIISRKSLGTQNVYDIGVEKDHNFLLKNGLV
ASN

[0096] Intein-N and intein-C may be fused to the N-terminal portion of the split Cas9 and the C-terminal portion of the split Cas9, respectively, for the joining of the N-terminal portion of the split Cas9 and the C-terminal portion of the split Cas9. For example, in some embodiments, an intein-N is fused to the C-terminus of the N-terminal portion of the split Cas9, i.e., to form a structure of N—[N-terminal portion of the split Cas9]-[intein-N]—C. In some embodiments, an intein-C is fused to the N-terminus of the C-terminal portion of the split Cas9, i.e., to form a structure of N-[intein-C]-[C-terminal portion of the split Cas9]-C. The mechanism of intein-mediated protein splicing for joining the proteins the inteins are fused to (e.g., split Cas9) is known in the art, e.g., as described in Shah et al., Chem Sci. 2014; 5(1):446-461, incorporated herein by reference. Methods for designing and using inteins are known in the art and described, for example by WO2014004336, WO2017132580, US20150344549, and US20180127780, each of which is incorporated herein by reference in their entirety.

[0097] The terms “isolated,” “purified,” or “biologically pure” refer to material that is free to varying degrees from components which normally accompany it as found in its native state. “Isolate” denotes a degree of separation from original source or surroundings. “Purify” denotes a degree of separation that is higher than isolation. A “purified” or “biologically pure” protein is sufficiently free of other materials such that any impurities do not materially affect the biological properties of the protein or cause other adverse consequences. That is, a nucleic acid or peptide of this invention is purified if it is substantially free of cellular material, viral material, or culture medium when produced by recombinant DNA techniques, or chemical precursors or other chemicals when chemically synthesized. Purity and homogeneity are typically determined using analytical chemistry techniques, for example, polyacrylamide gel electrophoresis or high performance liquid chromatography. The term “purified” can denote that a nucleic acid or protein gives rise to essentially one band in an electrophoretic gel. For a protein that can be subjected to modifications, for example, phosphorylation or glycosylation, different modifications may give rise to different isolated proteins, which can be separately purified.

[0098] By “isolated polynucleotide” is meant a nucleic acid (e.g., a DNA) that is free of the genes which, in the naturally-occurring genome of the organism from which the nucleic acid molecule of the invention is derived, flank the gene. The term therefore includes, for example, a recombinant DNA that is incorporated into a vector; into an autonomously replicating plasmid or virus; or into the genomic DNA of a prokaryote or eukaryote; or that exists as a separate molecule (for example, a cDNA or a genomic or cDNA fragment produced by PCR or restriction endonuclease digestion) independent of other sequences. In addition, the term includes an RNA molecule that is transcribed from a DNA molecule, as well as a recombinant DNA that is part of a hybrid gene encoding additional polypeptide sequence.

[0099] By an “isolated polypeptide” is meant a polypeptide of the invention that has been separated from components that naturally accompany it. Typically, the polypeptide is isolated when it is at least 60%, by weight, free from the proteins and naturally-occurring organic molecules with which it is naturally associated. Preferably, the preparation is at least 75%, more preferably at least 90%, and most preferably at least 99%, by weight, a polypeptide of the invention. An isolated polypeptide of the invention may be obtained, for example, by extraction from a natural source, by expression of a recombinant nucleic acid encoding such a polypeptide; or by chemically synthesizing the protein. Purity can be measured by any appropriate method, for example, column chromatography, polyacrylamide gel electrophoresis, or by HPLC analysis.

[0100] By “CD117 (C-kit; SCFR) polypeptide” is meant a polypeptide or fragment thereof having at least about 95% amino acid sequence identity to an amino acid sequence provided at GenBank Accession No. NP 000213 that binds an anti-CD117 antibody. In some embodiments, an CD117 polypeptide or fragment thereof has SCF signaling activity. An exemplary CD117 polypeptide sequence follows:

>NP_000213.1 mast/stem cell growth factor
receptor Kit isoform 1 precursor [Homo sapiens]
[sequence omitted]

[0101] By “CD117 polynucleotide” is meant a nucleic acid molecule that encodes a CD117 polypeptide. An exemplary CD117 polynucleotide sequence follows:

>NM_000222.2 Homo sapiens KIT proto-oncogene, receptor tyrosine kinase
(KIT), transcript variant 1, mRNA
TCTGGGGGCTCGGCTTTGCCGCGCTCGCTGCACTTGGGCGAGAGCTGGAACGTGGACCAGAGCTCGGATC
CCATCGCAGCTACCGCGATGAGAGGCGCTCGCGGCGCCTGGGATTTTCTCTGCGTTCTGCTCCTACTGCT
TCGCGTCCAGACAGGCTCTTCTCAACCATCTGTGAGTCCAGGGGAACCGTCTCCACCATCCATCCATCCA
GGAAAATCAGACTTAATAGTCCGCGTGGGCGACGAGATTAGGCTGTTATGCACTGATCCGGGCTTTGTCA
AATGGACTTTTGAGATCCTGGATGAAACGAATGAGAATAAGCAGAATGAATGGATCACGGAAAAGGCAGA
AGCCACCAACACCGGCAAATACACGTGCACCAACAAACACGGCTTAAGCAATTCCATTTATGTGTTTGTT
AGAGATCCTGCCAAGCTTTTCCTTGTTGACCGCTCCTTGTATGGGAAAGAAGACAACGACACGCTGGTCC
GCTGTCCTCTCACAGACCCAGAAGTGACCAATTATTCCCTCAAGGGGTGCCAGGGGAAGCCTCTTCCCAA
GGACTTGAGGTTTATTCCTGACCCCAAGGCGGGCATCATGATCAAAAGTGTGAAACGCGCCTACCATCGG
CTCTGTCTGCATTGTTCTGTGGACCAGGAGGGCAAGTCAGTGCTGTCGGAAAAATTCATCCTGAAAGTGA
GGCCAGCCTTCAAAGCTGTGCCTGTTGTGTCTGTGTCCAAAGCAAGCTATCTTCTTAGGGAAGGGGAAGA
ATTCACAGTGACGTGCACAATAAAAGATGTGTCTAGTTCTGTGTACTCAACGTGGAAAAGAGAAAACAGT
CAGACTAAACTACAGGAGAAATATAATAGCTGGCATCACGGTGACTTCAATTATGAACGTCAGGCAACGT
TGACTATCAGTTCAGCGAGAGTTAATGATTCTGGAGTGTTCATGTGTTATGCCAATAATACTTTTGGATC
AGCAAATGTCACAACAACCTTGGAAGTAGTAGATAAAGGATTCATTAATATCTTCCCCATGATAAACACT
ACAGTATTTGTAAACGATGGAGAAAATGTAGATTTGATTGTTGAATATGAAGCATTCCCCAAACCTGAAC
ACCAGCAGTGGATCTATATGAACAGAACCTTCACTGATAAATGGGAAGATTATCCCAAGTCTGAGAATGA
AAGTAATATCAGATACGTAAGTGAACTTCATCTAACGAGATTAAAAGGCACCGAAGGAGGCACTTACACA
TTCCTAGTGTCCAATTCTGACGTCAATGCTGCCATAGCATTTAATGTTTATGTGAATACAAAACCAGAAA
TCCTGACTTACGACAGGCTCGTGAATGGCATGCTCCAATGTGTGGCAGCAGGATTCCCAGAGCCCACAAT
AGATTGGTATTTTTGTCCAGGAACTGAGCAGAGATGCTCTGCTTCTGTACTGCCAGTGGATGTGCAGACA
CTAAACTCATCTGGGCCACCGTTTGGAAAGCTAGTGGTTCAGAGTTCTATAGATTCTAGTGCATTCAAGC
ACAATGGCACGGTTGAATGTAAGGCTTACAACGATGTGGGCAAGACTTCTGCCTATTTTAACTTTGCATT
TAAAGGTAACAACAAAGAGCAAATCCATCCCCACACCCTGTTCACTCCTTTGCTGATTGGTTTCGTAATC
GTAGCTGGCATGATGTGCATTATTGTGATGATTCTGACCTACAAATATTTACAGAAACCCATGTATGAAG
TACAGTGGAAGGTTGTTGAGGAGATAAATGGAAACAATTATGTTTACATAGACCCAACACAACTTCCTTA
TGATCACAAATGGGAGTTTCCCAGAAACAGGCTGAGTTTTGGGAAAACCCTGGGTGCTGGAGCTTTCGGG
AAGGTTGTTGAGGCAACTGCTTATGGCTTAATTAAGTCAGATGCGGCCATGACTGTCGCTGTAAAGATGC
TCAAGCCGAGTGCCCATTTGACAGAACGGGAAGCCCTCATGTCTGAACTCAAAGTCCTGAGTTACCTTGG
TAATCACATGAATATTGTGAATCTACTTGGAGCCTGCACCATTGGAGGGCCCACCCTGGTCATTACAGAA
TATTGTTGCTATGGTGATCTTTTGAATTTTTTGAGAAGAAAACGTGATTCATTTATTTGTTCAAAGCAGG
AAGATCATGCAGAAGCTGCACTTTATAAGAATCTTCTGCATTCAAAGGAGTCTTCCTGCAGCGATAGTAC
TAATGAGTACATGGACATGAAACCTGGAGTTTCTTATGTTGTCCCAACCAAGGCCGACAAAAGGAGATCT
GTGAGAATAGGCTCATACATAGAAAGAGATGTGACTCCCGCCATCATGGAGGATGACGAGTTGGCCCTAG
ACTTAGAAGACTTGCTGAGCTTTTCTTACCAGGTGGCAAAGGGCATGGCTTTCCTCGCCTCCAAGAATTG
TATTCACAGAGACTTGGCAGCCAGAAATATCCTCCTTACTCATGGTCGGATCACAAAGATTTGTGATTTT
GGTCTAGCCAGAGACATCAAGAATGATTCTAATTATGTGGTTAAAGGAAACGCTCGACTACCTGTGAAGT
GGATGGCACCTGAAAGCATTTTCAACTGTGTATACACGTTTGAAAGTGACGTCTGGTCCTATGGGATTTT
TCTTTGGGAGCTGTTCTCTTTAGGAAGCAGCCCCTATCCTGGAATGCCGGTCGATTCTAAGTTCTACAAG
ATGATCAAGGAAGGCTTCCGGATGCTCAGCCCTGAACACGCACCTGCTGAAATGTATGACATAATGAAGA
CTTGCTGGGATGCAGATCCCCTAAAAAGACCAACATTCAAGCAAATTGTTCAGCTAATTGAGAAGCAGAT
TTCAGAGAGCACCAATCATATTTACTCCAACTTAGCAAACTGCAGCCCCAACCGACAGAAGCCCGTGGTA
GACCATTCTGTGCGGATCAATTCTGTCGGCAGCACCGCTTCCTCCTCCCAGCCTCTGCTTGTGCACGACG
ATGTCTGAGCAGAATCAGTGTTTGGGTCACCCCTCCAGGAATGATCTCTTCTTTTGGCTTCCATGATGGT
TATTTTCTTTTCTTTCAACTTGCATCCAACTCCAGGATAGTGGGCACCCCACTGCAATCCTGTCTTTCTG
AGCACACTTTAGTGGCCGATGATTTTTGTCATCAGCCACCATCCTATTGCAAAGGTTCCAACTGTATATA
TTCCCAATAGCAACGTAGCTTCTACCATGAACAGAAAACATTCTGATTTGGAAAAAGAGAGGGAGGTATG
GACTGGGGGCCAGAGTCCTTTCCAAGGCTTCTCCAATTCTGCCCAAAAATATGGTTGATAGTTTACCTGA
ATAAATGGTAGTAATCACAGTTGGCCTTCAGAACCATCCATAGTAGTATGATGATACAAGATTAGAAGCT
GAAAACCTAAGTCCTTTATGTGGAAAACAGAACATCATTAGAACAAAGGACAGAGTATGAACACCTGGGC
TTAAGAAATCTAGTATTTCATGCTGGGAATGAGACATAGGCCATGAAAAAAATGATCCCCAAGTGTGAAC
AAAAGATGCTCTTCTGTGGACCACTGCATGAGCTTTTATACTACCGACCTGGTTTTTAAATAGAGTTTGC
TATTAGAGCATTGAATTGGAGAGAAGGCCTCCCTAGCCAGCACTTGTATATACGCATCTATAAATTGTCC
GTGTTCATACATTTGAGGGGAAAACACCATAAGGTTTCGTTTCTGTATACAACCCTGGCATTATGTCCAC
TGTGTATAGAAGTAGATTAAGAGCCATATAAGTTTGAAGGAAACAGTTAATACCATTTTTTAAGGAAACA
ATATAACCACAAAGCACAGTTTGAACAAAATCTCCTCTTTTAGCTGATGAACTTATTCTGTAGATTCTGT
GGAACAAGCCTATCAGCTTCAGAATGGCATTGTACTCAATGGATTTGATGCTGTTTGACAAAGTTACTGA
TTCACTGCATGGCTCCCACAGGAGTGGGAAAACACTGCCATCTTAGTTTGGATTCTTATGTAGCAGGAAA
TAAAGTATAGGTTTAGCCTCCTTCGCAGGCATGTCCTGGACACCGGGCCAGTATCTATATATGTGTATGT
ACGTTTGTATGTGTGTAGACAAATATTTGGAGGGGTATTTTTGCCCTGAGTCCAAGAGGGTCCTTTAGTA
CCTGAAAAGTAACTTGGCTTTCATTATTAGTACTGCTCTTGTTTCTTTTCACATAGCTGTCTAGAGTAGC
TTACCAGAAGCTTCCATAGTGGTGCAGAGGAAGTGGAAGGCATCAGTCCCTATGTATTTGCAGTTCACCT
GCACTTAAGGCACTCTGTTATTTAGACTCATCTTACTGTACCTGTTCCTTAGACCTTCCATAATGCTACT
GTCTCACTGAAACATTTAAATTTTACCCTTTAGACTGTAGCCTGGATATTATTCTTGTAGTTTACCTCTT
TAAAAACAAAACAAAACAAAACAAAAAACTCCCCTTCCTCACTGCCCAATATAAAAGGCAAATGTGTACA
TGGCAGAGTTTGTGTGTTGTCTTGAAAGATTCAGGTATGTTGCCTTTATGGTTTCCCCCTTCTACATTTC
TTAGACTACATTTAGAGAACTGTGGCCGTTATCTGGAAGTAACCATTTGCACTGGAGTTCTATGCTCTCG
CACCTTTCCAAAGTTAACAGATTTTGGGGTTGTGTTGTCACCCAAGAGATTGTTGTTTGCCATACTTTGT
CTGAAAAATTCCTTTGTGTTTCTATTGACTTCAATGATAGTAAGAAAAGTGGTTGTTAGTTATAGATGTC
TAGGTACTTCAGGGGCACTTCATTGAGAGTTTTGTCTTGGATATTCTTGAAAGTTTATATTTTTATAATT
TTTTCTTACATCAGATGTTTCTTTGCAGTGGCTTAATGTTTGAAATTATTTTGTGGCTTTTTTTGTAAAT
ATTGAAATGTAGCAATAATGTCTTTTGAATATTCCCAAGCCCATGAGTCCTTGAAAATATTTTTTATATA
TACAGTAACTTTATGTGTAAATACATAAGCGGCGTAAGTTTAAAGGATGTTGGTGTTCCACGTGTTTTAT
TCCTGTATGTTGTCCAATTGTTGACAGTTCTGAAGAATTCTAATAAAATGTACATATATAAATCAAAAAA
AAAAAAAAAA

[0102] By “C-X-C chemokine receptor type 4 (CXCR4) polypeptide” is meant a polypeptide or fragment thereof having at least about 95% amino acid sequence identity to an amino acid sequence provided at GenBank Accession NP 001008540 that binds an anti-CXCR4 antibody. An exemplary CXCR4 polypeptide sequence follows:

>NP_001008540.1 C-X-C chemokine receptor type 4
isoform a [Homo sapiens]
MSIPLPLLQIYTSDNYTEEMGSGDYDSMKEPCFREENANFNKIFLPTIY
SIIFLTGIVGNGLVILVMGYQKKLRSMTDKYRLHLSVADLLFVITLPFW
AVDAVANWYFGNFLCKAVHVIYTVNLYSSVLILAFISLDRYLAIVHATN
SQRPRKLLAEKVVYVGVWIPALLLTIPDFIFANVSEADDRYICDRFYPN
DLWVVVFQFQHIMVGLILPGIVILSCYCIIISKLSHSKGHQKRKALKTT
VILILAFFACWLPYYIGISIDSFILLEIIKQGCEFENTVHKWISITEAL
AFFHCCLNPILYAFLGAKFKTSAQHALTSVSRGSSLKILSKGKRGGHSS
VSTESESSSFHSS

[0103] By “CXCR4 polynucleotide” is meant a nucleic acid molecule that encodes a CXCR4 polypeptide. An exemplary CXCR4 polynucleotide sequence follows:

>NM_003467.2 Homo sapiens C-X-C motif chemokine receptor 4 (CXCR4),
transcript variant 2, mRNA
AACTTCAGTTTGTTGGCTGCGGCAGCAGGTAGCAAAGTGACGCCGAGGGCCTGAGTGCTCCAGTAGCCAC
CGCATCTGGAGAACCAGCGGTTACCATGGAGGGGATCAGTATATACACTTCAGATAACTACACCGAGGAA
ATGGGCTCAGGGGACTATGACTCCATGAAGGAACCCTGTTTCCGTGAAGAAAATGCTAATTTCAATAAAA
TCTTCCTGCCCACCATCTACTCCATCATCTTCTTAACTGGCATTGTGGGCAATGGATTGGTCATCCTGGT
CATGGGTTACCAGAAGAAACTGAGAAGCATGACGGACAAGTACAGGCTGCACCTGTCAGTGGCCGACCTC
CTCTTTGTCATCACGCTTCCCTTCTGGGCAGTTGATGCCGTGGCAAACTGGTACTTTGGGAACTTCCTAT
GCAAGGCAGTCCATGTCATCTACACAGTCAACCTCTACAGCAGTGTCCTCATCCTGGCCTTCATCAGTCT
GGACCGCTACCTGGCCATCGTCCACGCCACCAACAGTCAGAGGCCAAGGAAGCTGTTGGCTGAAAAGGTG
GTCTATGTTGGCGTCTGGATCCCTGCCCTCCTGCTGACTATTCCCGACTTCATCTTTGCCAACGTCAGTG
AGGCAGATGACAGATATATCTGTGACCGCTTCTACCCCAATGACTTGTGGGTGGTTGTGTTCCAGTTTCA
GCACATCATGGTTGGCCTTATCCTGCCTGGTATTGTCATCCTGTCCTGCTATTGCATTATCATCTCCAAG
CTGTCACACTCCAAGGGCCACCAGAAGCGCAAGGCCCTCAAGACCACAGTCATCCTCATCCTGGCTTTCT
TCGCCTGTTGGCTGCCTTACTACATTGGGATCAGCATCGACTCCTTCATCCTCCTGGAAATCATCAAGCA
AGGGTGTGAGTTTGAGAACACTGTGCACAAGTGGATTTCCATCACCGAGGCCCTAGCTTTCTTCCACTGT
TGTCTGAACCCCATCCTCTATGCTTTCCTTGGAGCCAAATTTAAAACCTCTGCCCAGCACGCACTCACCT
CTGTGAGCAGAGGGTCCAGCCTCAAGATCCTCTCCAAAGGAAAGCGAGGTGGACATTCATCTGTTTCCAC
TGAGTCTGAGTCTTCAAGTTTTCACTCCAGCTAACACAGATGTAAAAGACTTTTTTTTATACGATAAATA
ACTTTTTTTTAAGTTACACATTTTTCAGATATAAAAGACTGACCAATATTGTACAGTTTTTATTGCTTGT
TGGATTTTTGTCTTGTGTTTCTTTAGTTTTTGTGAAGTTTAATTGACTTATTTATATAAATTTTTTTTGT
TTCATATTGATGTGTGTCTAGGCAGGACCTGTGGCCAAGTTCTTAGTTGCTGTATGTCTCGTGGTAGGAC
TGTAGAAAAGGGAACTGAACATTCCAGAGCGTGTAGTGAATCACGTAAAGCTAGAAATGATCCCCAGCTG
TTTATGCATAGATAATCTCTCCATTCCCGTGGAACGTTTTTCCTGTTCTTAAGACGTGATTTTGCTGTAG
AAGATGGCACTTATAACCAAAGCCCAAAGTGGTATAGAAATGCTGGTTTTTCAGTTTTCAGGAGTGGGTT
GATTTCAGCACCTACAGTGTACAGTCTTGTATTAAGTTGTTAATAAAAGTACATGTTAAACTTAAAAAAA
AAAAAAAAAAA

[0104] By “CD135 polypeptide” is meant a polypeptide or fragment thereof having at least about 95% amino acid sequence identity to an amino acid sequence provided at GenBank Accession No. NP_004110 that binds an anti-CD135 antibody. An exemplary CD135 polypeptide sequence follows:

>NP_004110.2 receptor-type tyrosine-protein kinase FLT3 precursor
[Homo sapiens]
MPALARDGGQLPLLVVFSAMIFGTITNQDLPVIKCVLINHKNNDSSVGKSSSYPMVSESPEDLGCALRPQ
SSGTVYEAAAVEVDVSASITLQVLVDAPGNISCLWVFKHSSLNCQPHFDLQNRGVVSMVILKMTETQAGE
YLLFIQSEATNYTILFTVSIRNTLLYTLRRPYFRKMENQDALVCISESVPEPIVEWVLCDSQGESCKEES
PAVVKKEEKVLHELFGTDIRCCARNELGRECTRLFTIDLNQTPQTTLPQLFLKVGEPLWIRCKAVHVNHG
FGLTWELENKALEEGNYFEMSTYSTNRTMIRILFAFVSSVARNDTGYYTCSSSKHPSQSALVTIVEKGFI
NATNSSEDYEIDQYEEFCFSVRFKAYPQIRCTWTFSRKSFPCEQKGLDNGYSISKFCNHKHQPGEYIFHA
ENDDAQFTKMFTLNIRRKPQVLAEASASQASCFSDGYPLPSWTWKKCSDKSPNCTEEITEGVWNRKANRK
VFGQWVSSSTLNMSEAIKGFLVKCCAYNSLGTSCETILLNSPGPFPFIQDNISFYATIGVCLLFIVVLTL
LICHKYKKQFRYESQLQMVQVTGSSDNEYFYVDFREYEYDLKWEFPRENLEFGKVLGSGAFGKVMNATAY
GISKTGVSIQVAVKMLKEKADSSEREALMSELKMMTQLGSHENIVNLLGACTLSGPIYLIFEYCCYGDLL
NYLRSKREKFHRTWTEIFKEHNFSFYPTFQSHPNSSMPGSREVQIHPDSDQISGLHGNSFHSEDEIEYEN
QKRLEEEEDLNVLTFEDLLCFAYQVAKGMEFLEFKSCVHRDLAARNVLVTHGKVVKICDFGLARDIMSDS
NYVVRGNARLPVKWMAPESLFEGIYTIKSDVWSYGILLWEIFSLGVNPYPGIPVDANFYKLIQNGFKMDQ
PFYATEEIYIIMQSCWAFDSRKRPSFPNLTSFLGCQLADAEEAMYQNVDGRVSECPHTYQNRRPFSREMD
LGLLSPQAQVEDS

[0105] By “CD135 polynucleotide” is meant a nucleic acid molecule that encodes a CD135 polypeptide. An exemplary CD135 polynucleotide sequence follows:

>NM_004119.2 Homo sapiens fms related tyrosine kinase 3 (FLT3),
transcript variant 1, mRNA
ACCTGCAGCGCGAGGCGCGCCGCTCCAGGCGGCATCGCAGGGCTGGGCCGGCGCGGCCTGGGGACCCCGG
GCTCCGGAGGCCATGCCGGCGTTGGCGCGCGACGGCGGCCAGCTGCCGCTGCTCGTTGTTTTTTCTGCAA
TGATATTTGGGACTATTACAAATCAAGATCTGCCTGTGATCAAGTGTGTTTTAATCAATCATAAGAACAA
TGATTCATCAGTGGGGAAGTCATCATCATATCCCATGGTATCAGAATCCCCGGAAGACCTCGGGTGTGCG
TTGAGACCCCAGAGCTCAGGGACAGTGTACGAAGCTGCCGCTGTGGAAGTGGATGTATCTGCTTCCATCA
CACTGCAAGTGCTGGTCGACGCCCCAGGGAACATTTCCTGTCTCTGGGTCTTTAAGCACAGCTCCCTGAA
TTGCCAGCCACATTTTGATTTACAAAACAGAGGAGTTGTTTCCATGGTCATTTTGAAAATGACAGAAACC
CAAGCTGGAGAATACCTACTTTTTATTCAGAGTGAAGCTACCAATTACACAATATTGTTTACAGTGAGTA
TAAGAAATACCCTGCTTTACACATTAAGAAGACCTTACTTTAGAAAAATGGAAAACCAGGACGCCCTGGT
CTGCATATCTGAGAGCGTTCCAGAGCCGATCGTGGAATGGGTGCTTTGCGATTCACAGGGGGAAAGCTGT
AAAGAAGAAAGTCCAGCTGTTGTTAAAAAGGAGGAAAAAGTGCTTCATGAATTATTTGGGACGGACATAA
GGTGCTGTGCCAGAAATGAACTGGGCAGGGAATGCACCAGGCTGTTCACAATAGATCTAAATCAAACTCC
TCAGACCACATTGCCACAATTATTTCTTAAAGTAGGGGAACCCTTATGGATAAGGTGCAAAGCTGTTCAT
GTGAACCATGGATTCGGGCTCACCTGGGAATTAGAAAACAAAGCACTCGAGGAGGGCAACTACTTTGAGA
TGAGTACCTATTCAACAAACAGAACTATGATACGGATTCTGTTTGCTTTTGTATCATCAGTGGCAAGAAA
CGACACCGGATACTACACTTGTTCCTCTTCAAAGCATCCCAGTCAATCAGCTTTGGTTACCATCGTAGAA
AAGGGATTTATAAATGCTACCAATTCAAGTGAAGATTATGAAATTGACCAATATGAAGAGTTTTGTTTTT
CTGTCAGGTTTAAAGCCTACCCACAAATCAGATGTACGTGGACCTTCTCTCGAAAATCATTTCCTTGTGA
GCAAAAGGGTCTTGATAACGGATACAGCATATCCAAGTTTTGCAATCATAAGCACCAGCCAGGAGAATAT
ATATTCCATGCAGAAAATGATGATGCCCAATTTACCAAAATGTTCACGCTGAATATAAGAAGGAAACCTC
AAGTGCTCGCAGAAGCATCGGCAAGTCAGGCGTCCTGTTTCTCGGATGGATACCCATTACCATCTTGGAC
CTGGAAGAAGTGTTCAGACAAGTCTCCCAACTGCACAGAAGAGATCACAGAAGGAGTCTGGAATAGAAAG
GCTAACAGAAAAGTGTTTGGACAGTGGGTGTCGAGCAGTACTCTAAACATGAGTGAAGCCATAAAAGGGT
TCCTGGTCAAGTGCTGTGCATACAATTCCCTTGGCACATCTTGTGAGACGATCCTTTTAAACTCTCCAGG
CCCCTTCCCTTTCATCCAAGACAACATCTCATTCTATGCAACAATTGGTGTTTGTCTCCTCTTCATTGTC
GTTTTAACCCTGCTAATTTGTCACAAGTACAAAAAGCAATTTAGGTATGAAAGCCAGCTACAGATGGTAC
AGGTGACCGGCTCCTCAGATAATGAGTACTTCTACGTTGATTTCAGAGAATATGAATATGATCTCAAATG
GGAGTTTCCAAGAGAAAATTTAGAGTTTGGGAAGGTACTAGGATCAGGTGCTTTTGGAAAAGTGATGAAC
GCAACAGCTTATGGAATTAGCAAAACAGGAGTCTCAATCCAGGTTGCCGTCAAAATGCTGAAAGAAAAAG
CAGACAGCTCTGAAAGAGAGGCACTCATGTCAGAACTCAAGATGATGACCCAGCTGGGAAGCCACGAGAA
TATTGTGAACCTGCTGGGGGCGTGCACACTGTCAGGACCAATTTACTTGATTTTTGAATACTGTTGCTAT
GGTGATCTTCTCAACTATCTAAGAAGTAAAAGAGAAAAATTTCACAGGACTTGGACAGAGATTTTCAAGG
AACACAATTTCAGTTTTTACCCCACTTTCCAATCACATCCAAATTCCAGCATGCCTGGTTCAAGAGAAGT
TCAGATACACCCGGACTCGGATCAAATCTCAGGGCTTCATGGGAATTCATTTCACTCTGAAGATGAAATT
GAATATGAAAACCAAAAAAGGCTGGAAGAAGAGGAGGACTTGAATGTGCTTACATTTGAAGATCTTCTTT
GCTTTGCATATCAAGTTGCCAAAGGAATGGAATTTCTGGAATTTAAGTCGTGTGTTCACAGAGACCTGGC
CGCCAGGAACGTGCTTGTCACCCACGGGAAAGTGGTGAAGATATGTGACTTTGGATTGGCTCGAGATATC
ATGAGTGATTCCAACTATGTTGTCAGGGGCAATGCCCGTCTGCCTGTAAAATGGATGGCCCCCGAAAGCC
TGTTTGAAGGCATCTACACCATTAAGAGTGATGTCTGGTCATATGGAATATTACTGTGGGAAATCTTCTC
ACTTGGTGTGAATCCTTACCCTGGCATTCCGGTTGATGCTAACTTCTACAAACTGATTCAAAATGGATTT
AAAATGGATCAGCCATTTTATGCTACAGAAGAAATATACATTATAATGCAATCCTGCTGGGCTTTTGACT
CAAGGAAACGGCCATCCTTCCCTAATTTGACTTCGTTTTTAGGATGTCAGCTGGCAGATGCAGAAGAAGC
GATGTATCAGAATGTGGATGGCCGTGTTTCGGAATGTCCTCACACCTACCAAAACAGGCGACCTTTCAGC
AGAGAGATGGATTTGGGGCTACTCTCTCCGCAGGCTCAGGTCGAAGATTCGTAGAGGAACAATTTAGTTT
TAAGGACTTCATCCCTCCACCTATCCCTAACAGGCTGTAGATTACCAAAACAAGATTAATTTCATCACTA
AAAGAAAATCTATTATCAACTGCTGCTTCACCAGACTTTTCTCTAGAAGCTGTCTGCGTTTACTCTTGTT
TTCAAAGGGACTTTTGTAAAATCAAATCATCCTGTCACAAGGCAGGAGGAGCTGATAATGAACTTTATTG
GAGCATTGATCTGCATCCAAGGCCTTCTCAGGCTGGCTTGAGTGAATTGTGTACCTGAAGTACAGTATAT
TCTTGTAAATACATAAAACAAAAGCATTTTGCTAAGGAGAAGCTAATATGATTTTTTAAGTCTATGTTTT
AAAATAATATGTAAATTTTTCAGCTATTTAGTGATATATTTTATGGGTGGGAATAAAATTTCTACTACAG
AATTGCCCATTATTGAATTATTTACATGGTATAATTAGGGCAAGTCTTAACTGGAGTTCACGAACCCCCT
GAAATTGTGCACCCATAGCCACCTACACATTCCTTCCAGAGCACGTGTGCTTTTACCCCAAGATACAAGG
AATGTGTAGGCAGCTATGGTTGTCACAGCCTAAGATTTCTGCAACAACAGGGGTTGTATTGGGGGAAGTT
TATAATGAATAGGTGTTCTACCATAAAGAGTAATACATCACCTAGACACTTTGGCGGCCTTCCCAGACTC
AGGGCCAGTCAGAAGTAACATGGAGGATTAGTATTTTCAATAAAGTTACTCTTGTCCCCACAAAAAAA

[0106] By “CD90 polypeptide” is meant a polypeptide or fragment thereof having at least about 95% amino acid sequence identity to an amino acid sequence provided at GenBank Accession No. NP_001298089 that binds an anti-CD90 antibody. An exemplary CD90 polypeptide sequence follows:

>NP_001298089.1 thy-1 membrane glycoprotein
isoform 1 preproprotein [Homo sapiens]
MNLAISIALLLTVLQVSRGQKVTSLTACLVDQSLRLDCRHENTSSSPIQY
EFSLTRETKKHVLFGTVGVPEHTYRSRTNFTSKYNMKVLYLSAFTSKDEG
TYTCALHHSGHSPPISSQNVTVLRDKLVKCEGISLLAQNTSWLLLLLLSL
SLLQATDFMSL

[0107] By “CD90 polynucleotide” is meant a nucleic acid molecule that encodes a CD90 polypeptide. An exemplary CD90 polynucleotide sequence follows:

>NM_006288.5 Homo sapiens Thy-1 cell surface antigen (THY1),
transcript variant 1, mRNA
AGCAACCGGAGGCGGCGGCGCGTCTGGAGGAGGCTGCAGCAGCGGAAGACCCCAGTCCAGATCCAGGACT
GAGATCCCAGAACCATGAACCTGGCCATCAGCATCGCTCTCCTGCTAACAGTCTTGCAGGTCTCCCGAGG
GCAGAAGGTGACCAGCCTAACGGCCTGCCTAGTGGACCAGAGCCTTCGTCTGGACTGCCGCCATGAGAAT
ACCAGCAGTTCACCCATCCAGTACGAGTTCAGCCTGACCCGTGAGACAAAGAAGCACGTGCTCTTTGGCA
CTGTGGGGGTGCCTGAGCACACATACCGCTCCCGAACCAACTTCACCAGCAAATACAACATGAAGGTCCT
CTACTTATCCGCCTTCACTAGCAAGGACGAGGGCACCTACACGTGTGCACTCCACCACTCTGGCCATTCC
CCACCCATCTCCTCCCAGAACGTCACAGTGCTCAGAGACAAACTGGTCAAGTGTGAGGGCATCAGCCTGC
TGGCTCAGAACACCTCGTGGCTGCTGCTGCTCCTGCTCTCCCTCTCCCTCCTCCAGGCCACGGATTTCAT
GTCCCTGTGACTGGTGGGGCCCATGGAGGAGACAGGAAGCCTCAAGTTCCAGTGCAGAGATCCTACTTCT
CTGAGTCAGCTGACCCCCTCCCCCCAATCCCTCAAACCTTGAGGAGAAGTGGGGACCCCACCCCTCATCA
GGAGTTCCAGTGCTGCATGCGATTATCTACCCACGTCCACGCGGCCACCTCACCCTCTCCGCACACCTCT
GGCTGTCTTTTTGTACTTTTTGTTCCAGAGCTGCTTCTGTCTGGTTTATTTAGGTTTTATCCTTCCTTTT
CTTTGAGAGTTCGTGAAGAGGGAAGCCAGGATTGGGGACCTGATGGAGAGTGAGAGCATGTGAGGGGTAG
TGGGATGGTGGGGTACCAGCCACTGGAGGGGTCATCCTTGCCCATCGGGACCAGAAACCTGGGAGAGACT
TGGATGAGGAGTGGTTGGGCTGTGCCTGGGCCTAGCACGGACATGGTCTGTCCTGACAGCACTCCTCGGC
AGGCATGGCTGGTGCCTGAAGACCCCAGATGTGAGGGCACCACCAAGAATTTGTGGCCTACCTTGTGAGG
GAGAGAACTGAGCATCTCCAGCATTCTCAGCCACAACCAAAAAAAAATAAAAAGGGCAGCCCTCCTTACC
ACTGTGGAAGTCCCTCAGAGGCCTTGGGGCATGACCCAGTGAAGATGCAGGTTTGACCAGGAAAGCAGCG
CTAGTGGAGGGTTGGAGAAGGAGGTAAAGGATGAGGGTTCATCATCCCTCCCTGCCTAAGGAAGCTAAAA
GCATGGCCCTGCTGCCCCTCCCTGCCTCCACCCACAGTGGAGAGGGCTACAAAGGAGGACAAGACCCTCT
CAGGCTGTCCCAAGCTCCCAAGAGCTTCCAGAGCTCTGACCCACAGCCTCCAAGTCAGGTGGGGTGGAGT
CCCAGAGCTGCACAGGGTTTGGCCCAAGTTTCTAAGGGAGGCACTTCCTCCCCTCGCCCATCAGTGCCAG
CCCCTGCTGGCTGGTGCCTGAGCCCCTCAGACAGCCCCCTGCCCCGCAGGCCTGCCTTCTCAGGGACTTC
TGCGGGGCCTGAGGCAAGCCATGGAGTGAGACCCAGGAGCCGGACACTTCTCAGGAAATGGCTTTTCCCA
ACCCCCAGCCCCCACCCGGTGGTTCTTCCTGTTCTGTGACTGTGTATAGTGCCACCACAGCTTATGGCAT
CTCATTGAGGACAAAGAAAACTGCACAATAAAACCAAGCCTCTGGAATCTGTCCTCGTGTCCACCTGGCC
TTCGCTCCTCCAGCAGTGCCTGCCTGCCCCCGCTTCGCTGGGGTCTCCACGGGTGAGGCTGGGGAACGCC
ACCTCTTCCTCTTCCCTGACTTCTCCCCAACCACTTAGTAGCAACGCTACCCCAGGGGCTAATGACTGCA
CACTGGGCTTCTTTTCAGAATGACCCTAACGAGACACATTTGCCCAAATAAACGAACATCCCATGTCTGC
TGACTCACCTGGCTGGAACAACATGCTTACTGCCAACATGTGGGCCGAACCACATGGCCCTGGCTCTGGA
ATGCACAAGTGGCTTTGCGTGAATCTGCGCTAAGCTATGCAGTCTGCTTTTTCTTCTCAGCTCTGGTAGT
TCTTCAGAAATGTACCCTCCAGGCACATCCACTATTGCGAGGGTGAGCACGAAGGGTGGGAGATGCCCAT
GTCCTCAAGGCATCACTTCCTAAATCCAAAAGCATCGGCAGGAGAAAGGACTGGGGACAAATACTGTCCC
TTCGGGAGTAGGGAGGGAACACTGAGGCCCATCCCTGGCTCCTTCCCTAAAAGTAGAGTAAAATGGAAGC
GAGCATCCTGGGATTGGGGGCAAGAGGGGGACCGCAGGGTAGCTGTGGGTTCCAACTGCTGTCAGAGTCA
GAGAGGCAGCCCCAAGCCAGCCTCCCTGCTTTGCCAGGGAATTTGGGGGAGGAAGGTGACAGCTGCCCAG
AGGCTGACTCATCTGATATTTAGCACTGGGTAGGATGATTGTTTCTGAGCATTTTTCTTAAAGGCCTCAG
ATCTAAATTATGCCACCGGCTCCCACTCTTGCTACCTCCCGTCAACTTCTCTGCCTTGCCTTCCACCCCT
GTAGTTACCATACACAGAGGAGGAGGAGCTGTCCTTGTCCCAGGTTGGGAGGCTGACAACCCCTTAGCAA
GATGCTGCCAGCCCAGAGCTCTCCAAGGGGAGGAACACCCCTGAGACTCAGGCCCCTCTCCTTCAGCCCT
GCTTGGGCTGCAAGCGCCGTGCCAAGGAAAGGCATCTTGGTGAGAAGAGCTGCTGTGGGGGAAGGGAGAT
CAAATGCCAGAGAAATGTGGGGTGCCCCACCCTCAGGATAGTAAAAGAGTATGGAGGTATTTCTGGAAGG
AAATGAGCGGCACTGTGTGAAGCCTCGCACCTGTGTGACACTTCCTATGGGGTCTTTGTCACACTCTAGT
ACTATGTCCCTGAAGAGTTTAGCAGCCACACTCTTAGAAGGGTGCTGGGAGATGGTGTTGCCCTCTGCAG
CCATGTTTAGGGGAGCGGAACCTGAGGCCCACAGTGGGTGAGATTAGCTCAAGAAGCCACAGAGGCCACC
AGAGGGCCACGGACTTCGGAAAGGAGAAGAGAAGAACAGGGCATCAGGCCTCACAACGCAAACCTACCCA
GAGATGGGCACAGTGGCTCATGCCTGTAATCCCACCACTTTGGGAAGAGGCGGATCGCTTGAGGTCAGGA
GTTCGAGACTAGCCTCGAAACCCTATCTCTACTAAAAATACAAAAATTAGCCAGGCATGGTGGCCTGCGC
CTGTAATCCCAGCTACTCAGGAGGCTGAGGCAGGAGAATCACTTGAACCCGGGAGGCGGAGGTTGCAGTG
AGCCAAGATTGCACCACTGCACTCCAGCCTGGGAGATAGAGTGAGACTCCATCTCAAAAAAATAAAAAAT
AAAATAAACCTACCCGGAATGACCATGCTGAGGACTGGGAGCCCGCAGACTTTCAGCCACAGGCCGCGAC
AGCCGTGGGTCCCTCCCTGGTCAAGTCAGCAGGCCTTGTGGAGGCTGTGGGGTATCTGTGGTGACTCAGG
TAATTATAGAGGGCTGGCCCCCAGCCCTGGTTCCTGTACACATGCCCCAACCCCATCCCCATCCACTCCC
TCGCCAGTCCTAACCTCTTTCCTGGGTCCCCCCCCTTCAGCACCTAAGTCCATACCTAGGGCCGTGGAAT
TCCCGCTCAAGAGCAACAGAAGCCCCTCTCTGCACCCCCATTTCTGGACTGGATTGTCCACTGAGACGCG
CAATGTCTGCATCTCTGACATCTAGAGGCTTCCTCGGGAAGGGCATGGGGATCTCCGTGAGATGTGGGGA
CTTTCACTGGCCAACCAAGAAATCTACACAGCGTCCGGGGACCTGTGACACACATCCCTCCCGCCTCCTC
AACCTGATGTCCCTCTCTGAATCTGCAGCTTTCGTGCTGTGAAGGTGTCTTTACATGTGAAACAAACAAA
CCCAAGTCAAGAGTAAATCATCTCATTTACTAGTGAGAAAATGTTGGAGCTGGAGTCCTTCAGAGAGTCC
TGGCCAGGCAAGAGGGCCATCAGCTCTCTTCTGCTCAACAGGGGCTCTCAGCCTCAGGACACTCTCAGGC
CTGGAATGTCCCCAACACACTCAAGGAGAAACATGTCCTGTGCAGACCCACAGGAGGCATCTTTGCCCGG
CACAAGGAAGAGCTGGGGTCAGTGGGACCTGTAGATGTAGACACATCATATGGAGGGTGGGTAGGACCAA
TGTGGCAGCTTCATGGAGGCCAAGTGTGGCTCTGCACCAGGAAGGGGCTGTGATGGCTGGAGGTGCCCAG
CAGTGCAGGCGGGGAGTGCCTGGCAGTGGCGTGGCCAGGTGGAGGCCACCTGTCAAGTTTGCAATAAAGC
AGTTTCCTGAATTTGGTGAGAA

[0108] By “CD45 polypeptide” is meant a polypeptide or fragment thereof having at least about 95% amino acid sequence identity to an amino acid sequence provided at GenBank Accession No. NP_001254727 that binds an anti-CD45 antibody. An exemplary CD45 polypeptide sequence follows:

>NP_001254727.1 receptor-type tyrosine-protein
phosphatase C isoform 5 precursor [Homo sapiens]
MTMYLWLKLLAFGFAFLDTEVFVTGQSPTPSPTGHLQAEEQGSQSKSPNL
KSREADSSAFSWWPKAREPL
TNHWSKSKSPKAEELGV

[0109] By “CD45 polynucleotide” is meant a nucleic acid molecule that encodes a CD45 polypeptide. An exemplary CD45 polynucleotide sequence follows:

>NM_001267798.2 Homo sapiens protein tyrosine phosphatase receptor
type C (PTPRC), transcript variant 5, mRNA
GACATCATCACCTAGCAGTTCATGCAGCTAGCAAGTGGTTTGTTCTTAGGGTAACAGAGGAGGAAATTGT
TCCTCGTCTGATAAGACAACAGTGGAGAAAGGACGCATGCTGTTTCTTAGGGACACGGCTGACTTCCAGA
TATGACCATGTATTTGTGGCTTAAACTCTTGGCATTTGGCTTTGCCTTTCTGGACACAGAAGTATTTGTG
ACAGGGCAAAGCCCAACACCTTCCCCCACTGGCCATCTGCAAGCTGAGGAGCAAGGAAGCCAATCCAAGT
CACCAAACCTCAAAAGTAGGGAAGCTGACAGTTCAGCCTTCAGTTGGTGGCCAAAGGCCCGAGAGCCCCT
CACAAACCACTGGAGTAAGTCCAAGAGTCCAAAAGCTGAGGAACTTGGAGTCTGATGTTCAAGAGCAGGA
AGCAGCCAGCACGAGAGAAAGATGAAGACCAGAAGACTCAGCAAGCTCACTTCTCCTACCTTCTTGTGCC
TGCTTTTTCTAGCCGTGCTGGCAGTTGCTTGGATGATGCCCACTCATATTGGGTGGGGGTGGGGGGGTTG
GGGAGGGTCTGCCTCCCCCAGTCCACTGACTCAAATGTTAATCTCCCTTGGCAATACGCTCACAGGCACA
CCCAGGAACAATACTTTGCATCCTTCAATCCAATCAAGTTGACACTCAATATTAACCATCAAATACTATT
ATAAGGAGAATGTTGCATGATTTTCCTTCTAGTCTGTTTGTAATTCACATCTAATGAAAGAGTGAGAGTG
GACGATAAAGGGAACTTGTTGAAACATTTCTCTCAAAGCAAAAGGGATCATTGGAAGCAGGCAGACACCA
GAATTGGTTTAACCTAAAAATAACAAATTAATAATTATCAAGTCTATAATGATGACAGTGACTTAATGTG
AATAGAAAGAATTCTAAACTCTCTCCTTCCTTCCTCCCTCCCTTCTTTCCTACTTTCTTTCCACTCCCTT
TCTCCCACCCCCTTTTCTTTTCCTTTCTTTTCTCCCACCCTCTCTCCCTCCCTTTCTTTTATTCAATGCA
TAGTAGTTGAAAAAATCTAAAGTTAGACCTGATTTTACACTGAAGACTAGAGGTAGTTACTATCCTATTA
CTGTACTTAGTTGGCTATGCTGGCATGTCATTATGGGTAAAAGTTTGATGGATTTATTTGTGAGTTATTT
GGTTATGAAAATCTAGAGATTGAAGTTTTTCATTAGAAAATAACACACATAACAAGTCTATGATCATTTT
GCATTTCTGTAATCACAGAATAGTTCTGCAATATTTCATGTATATTGGAATTGAAGTTCAATTGAATTTT
ATCTGTATTTAGTAAAAATTAACTTTAGCTTTGATACTAATGAATAAAGCTGGGTTTTTTATTTA

[0110] By “CD34 polypeptide” is meant a polypeptide or fragment thereof having at least about 95% amino acid sequence identity to an amino acid sequence provided at GenBank Accession No. NP_001020280 that binds an anti-CD34 antibody. An exemplary CD34 polypeptide sequence follows:

>NP_001020280.1 hematopoietic progenitor cell
antigen CD34 isoform a precursor [Homo sapiens]
MLVRRGARAGPRMPRGWTALCLLSLLPSGFMSLDNNGTATPELPTQGTFS
NVSTNVSYQETTTPSTLGSTSLHPVSQHGNEATTNITETTVKFTSTSVIT
SVYGNTNSSVQSQTSVISTVFTTPANVSTPETTLKPSLSPGNVSDLSTTS
TSLATSPTKPYTSSSPILSDIKAEIKCSGIREVKLTQGICLEQNKTSSCA
EFKKDRGEGLARVLCGEEQADADAGAQVCSLLLAQSEVRPQCLLLVLANR
TEISSKLQLMKKHQSDLKKLGILDFTEQDVASHQSYSQKTLIALVTSGAL
LAVLGITGYFLMNRRSWSPTGERLGEDPYYTENGGGQGYSSGPGTSPEAQ
GKASVNRGAQENGTGQATSRNGHSARQHWADTEL

[0111] By “CD34 polynucleotide” is meant a nucleic acid molecule that encodes a CD34 polypeptide. An exemplary CD34 polynucleotide sequence follows:

>NM_001025109.2 Homo sapiens CD34 molecule (CD34), transcript variant 1, mRNA
AGTGTCTTCCACTCGGTGCGTCTCTCTAGGAGCCGCGCGGGAAGGATGCTGGTCCGCAGGGGCGCGCGCGCAGGG
CCCAGGATGCCGCGGGGCTGGACCGCGCTTTGCTTGCTGAGTTTGCTGCCTTCTGGGTTCATGAGTCTTGACAAC
AACGGTACTGCTACCCCAGAGTTACCTACCCAGGGAACATTTTCAAATGTTTCTACAAATGTATCCTACCAAGAA
ACTACAACACCTAGTACCCTTGGAAGTACCAGCCTGCACCCTGTGTCTCAACATGGCAATGAGGCCACAACAAAC
ATCACAGAAACGACAGTCAAATTCACATCTACCTCTGTGATAACCTCAGTTTATGGAAACACAAACTCTTCTGTC
CAGTCACAGACCTCTGTAATCAGCACAGTGTTCACCACCCCAGCCAACGTTTCAACTCCAGAGACAACCTTGAAG
CCTAGCCTGTCACCTGGAAATGTTTCAGACCTTTCAACCACTAGCACTAGCCTTGCAACATCTCCCACTAAACCC
TATACATCATCTTCTCCTATCCTAAGTGACATCAAGGCAGAAATCAAATGTTCAGGCATCAGAGAAGTGAAATTG
ACTCAGGGCATCTGCCTGGAGCAAAATAAGACCTCCAGCTGTGCGGAGTTTAAGAAGGACAGGGGAGAGGGCCTG
GCCCGAGTGCTGTGTGGGGAGGAGCAGGCTGATGCTGATGCTGGGGCCCAGGTATGCTCCCTGCTCCTTGCCCAG
TCTGAGGTGAGGCCTCAGTGTCTACTGCTGGTCTTGGCCAACAGAACAGAAATTTCCAGCAAACTCCAACTTATG
AAAAAGCACCAATCTGACCTGAAAAAGCTGGGGATCCTAGATTTCACTGAGCAAGATGTTGCAAGCCACCAGAGC
TATTCCCAAAAGACCCTGATTGCACTGGTCACCTCGGGAGCCCTGCTGGCTGTCTTGGGCATCACTGGCTATTTC
CTGATGAATCGCCGCAGCTGGAGCCCCACAGGAGAAAGGCTGGGCGAAGACCCTTATTACACGGAAAACGGTGGA
GGCCAGGGCTATAGCTCAGGACCTGGGACCTCCCCTGAGGCTCAGGGAAAGGCCAGTGTGAACCGAGGGGCTCAG
GAAAACGGGACCGGCCAGGCCACCTCCAGAAACGGCCATTCAGCAAGACAACACGTGGTGGCTGATACCGAATTG
TGACTCGGCTAGGTGGGGCAAGGCTGGGCAGTGTCCGAGAGAGCACCCCTCTCTGCATCTGACCACGTGCTACCC
CCATGCTGGAGGTGACATCTCTTACGCCCAACCCTTCCCCACTGCACACACCTCAGAGGCTGTTCTTGGGGCCCT
ACACCTTGAGGAGGGGCAGGTAAACTCCTGTCCTTTACACATTCGGCTCCCTGGAGCCAGACTCTGGTCTTCTTT
GGGTAAACGTGTGACGGGGGAAAGCCAAGGTCTGGAGAAGCTCCCAGGAACAATCGATGGCCTTGCAGCACTCAC
ACAGGACCCCCTTCCCCTACCCCCTCCTCTCTGCCGCAATACAGGAACCCCCAGGGGAAAGATGAGCTTTTCTAG
GCTACAATTTTCTCCCAGGAAGCTTTGATTTTTACCGTTTCTTCCCTGTATTTTCTTTCTCTACTTTGAGGAAAC
CAAAGTAACCTTTTGCACCTGCTCTCTTGTAATGATATAGCCAGAAAAACGTGTTGCCTTGAACCACTTCCCTCA
TCTCTCCTCCAAGACACTGTGGACTTGGTCACCAGCTCCTCCCTTGTTCTCTAAGTTCCACTGAGCTCCATGTGC
CCCCTCTACCATTTGCAGAGTCCTGCACAGTTTTCTGGCTGGAGCCTAGAACAGGCCTCCCAAGTTTTAGGACAA
ACAGCTCAGTTCTAGTCTCTCTGGGGCCACACAGAAACTCTTTTTGGGCTCCTTTTTCTCCCTCTGGATCAAAGT
AGGCAGGACCATGGGACCAGGTCTTGGAGCTGAGCCTCTCACCTGTACTCTTCCGAAAAATCCTCTTCCTCTGAG
GCTGGATCCTAGCCTTATCCTCTGATCTCCATGGCTTCCTCCTCCCTCCTGCCGACTCCTGGGTTGAGCTGTTGC
CTCAGTCCCCCAACAGATGCTTTTCTGTCTCTGCCTCCCTCACCCTGAGCCCCTTCCTTGCTCTGCACCCCCATA
TGGTCATAGCCCAGATCAGCTCCTAACCCTTATCACCAGCTGCCTCTTCTGTGGGTGACCCAGGTCCTTGTTTGC
TGTTGATTTCTTTCCAGAGGGGTTGAGCAGGGATCCTGGTTTCAATGACGGTTGGAAATAGAAATTTCCAGAGAA
GAGAGTATTGGGTAGATATTTTTTCTGAATACAAAGTGATGTGTTTAAATACTGCAATTAAAGTGATACTGAAAC
ACATCTGTTATGTGACTCTGTCTTAGCTGGGTGTGTCTGCATGCAAGAGTGACACCCTCCATTAGACCTAGCTAG
ACTGTGCAGTGATGTGGTGGGGAGGACCAGCCAGGGAAGAGGGAGCACCTCAGCAGACACAGGCACCAGCCAGGA
TGCTAAGGACCTTTAGCCAAGTCTGCCAACTATTCTCCTCCATGGGGAGAGGAAACATCCATTTCCAGTGGTAGA
AAGGCAGACCCGAATGTACCAGGGAGCTTCCAAATGGAGGGTGGTATGTTGGGTTCTTAGGAGCTGTACCCTTCA
TGAACACCCTTCTGAGAAGAGGAGCATGCTGATCACTGCTGCAAAATATGCAAAACAAAGGGAAGGGGCAATGTC
CTGTGCACCCTTTATTATCAGGCCACCCCCCTCCCCAGCCCCCCAGGTCAGAGTAGACACAGTGAAGGACTATGT
GGGGACTGTTGTTCTAGAGACCTGGCAGCCAACTCAGGGAGGGGGCTGGTTTCCACCCTCAAGATTAAGACAGCA
GCCTAATTAAAAAAAAAATCTGTAAGCATGTACCTCCCCCCAGCTTCCAAAACAACCCCCACCCCACCCCTACCA
GGCCATAGGAAGTTGGGGAGGGAGTGCTGAGGAGCTCCAGGAAACACTCCCAAGTGTGTCGACAGTGGCAGAGGC
AGTTGGGGCCAAACAAAGGTTGATTCTTCCATTCTTATCTCCATAAAGCCAGACCTTTCCCTTCAGCACTCCTCC
ACCCCCATCTCCTTCTTGCTTTTCTCCAACTCCTCTAATCATAGGTTCTTCCCTAGGACAGAGGGGAGGCGAAAT
GATGAGGTTCAGAGTCTTCCCTCAAAGGCGATGGCTGCCTTGAGGGTTGGAGCAAAGGATGATGAGCAAAAGACG
ATGGTAATCAGTAGGGAAGTCCAGCCCACTTGCATCTAGTTGCACATCTTGCCTTGAGAGTAATCCAGTGAGGGT
CTGTCCCAGCTAGGACATCAAGTAGGAGGGGTGGGTTCAGGGTTCAGATTCCTAGGAAATATGGGAGGAGAGGAA
AAGGCAACTTGGATGCACCTCCAGCTTCAGGCCTAGCAACCTGCAATGCATCTCACCCTGAGTTTGCTGGAATGT
GTATGTATGCTTTGGGAGGAAGGGCTGTGTGTGTATTGCGGGGTGGGGTGGGGCAGCTGGTTCCCTCTGACAGCT
GGACAGCTTGCCCTGAAGAATTTGCCTGCTTTCTGGAAAAATCCAACTTTCCCACCGTGGGCCTGAGCGTCCTGG
TACAGCAATGGCGCCACCTGCTGGCCTTATTGAGGTCCTACTGCTCAGCCTCAGCTCAATCGCCTCCATGTTGGG
CTTCTCTCCCTGGCTGCCCCACCCTCTAGTCCAATTTCTCTTGTACACAAAGCTCATATAACTATAGAACGTCAC
TGTTGAAGAGAACTTTAAAGATACATTTAATTAAACTCCCTTATGGTATAGTTAAAGACAAACTAAGGCTCAGAG
AAGGGAGGTGGCTTGCCCAATCACCCAGAATTCCAAAGTCCTGAATCTGTAGTTTTCCCTTCCATCATATCATCC
TACTCTTCTGCCGAGTCCTCCGTGTTACTCCAGTTGGATGTCATGAAGCCAGTGTGGCAGTGTGAAGATAGGTTT
GGGACTTCACTTCTGGAGCATTTCATCAACATAAGCTATCCTAGGCCTGGCCAGCCAAGCAGGTCCTGGAGGAGC
CCCAGGACAAAGATCACAGGAGGCCATGAGGTTCGGCTTCTTCGGCGCCCACAGTGAGCCCAGGAAAATTAGCTG
TAGGGTATTACACTGTTGACTATGGAGAGCATATCTGGAATTATCTTCAGCCAGATTTTCATCTGAATGGATAAA
TGGGAATACCATCTAAGTCCAGATAAATAGATCACTTCCATCTCATCCCTTCTAGGTAGATTAATCCCACACTTC
CTCTTCACACAAAACCAGTAATAGGTCATCGATTTTGTGCAACAGGATGCTGCTTCTCTTCCTAAAGCCCCCATC
GAAGAGGCTTCCAGCCACCATTCAATCATTCATCAAGTCTTATGATGTGCCAGACACTGCGCGAAATGTGCCAGA
ACATCTGTTATGTGCCAGACACTGTTCTTGAGACTGGGGATACAGCAAACACTCATGAAGCTTATAATTCTAGCA
GAAGAGGACAGTAAACAATGTCATCTCAGTAAGTATATACATGTGTTTTCAGGATTGAGAGCTATGAAAAACATA
AAATATATTGAGAATAATGGTTGGTATTTTACATATGGTGGTTACTTTTAGAAAAATAACAGTGGAGAGCACAGC
TTCACTTGAATGAAGTGGAGAAGCAGGTTGTATGCCAAGCTGGGAGAGATTATCCCACACAGGGGAAAGGACAAG
TGCAAAGCCCTATGATGAAAAGCTGCCAAGTGCAGAAAGCCTCAGATGGCAGGGGGCAAGATGGCCATGAGGTTG
TGTCAGTGAGTGGGGGTGGGGAGAGGCAGGAGGTCAGACTACATGGGGCCTTTTTAGTTGTAGATTGGGAAGCCA
CTGGAGGGTTTTGAGCAGAGAAGTCATATCATCTGCTTTATGTTTTAAAAGGATCATGCTGGCTGCTGAGTAGAG
AATAGAGGTTGAGGGATAAGAAAGTAGAAGGAGACCGTAGCAAGAAGAACGATCATGGCTGGGAGCAGGTGATCA
TATTGGCAGTGATGAGATCAAGCAGAATTCAAAAAGTGGTTTCAAAGTAGAGGTAACAGGACTTGCTCAGTCTAT
TTATTTCTTCAAATAATAATCATATTTACAATGATAGTAGCTAACAGTTTTTGAGTGCTTACTGTATGAAAATTG
AGATATGGTGCCAATATTTAAATAGCATATTTTACTTAACATTCACAGAAACCCTGTGAAGTAGGTTCTATTATC
TCAGAAAAAGAAACTGAAACTCAGAGAATAACAAGGGACTGTGTTACGTGCACAGTGGCAGAGGCAAAGATGAAT
AGGATGTGAGTTTATTTGAACCCCAAATGTTTAAATCTTGGGGATAATACAACACACATTTAAACAAAGAAGCAA
GAAAAAAAATGCACAACAGAAAGTGAGAAATAACACGAGGAAAGACTAAATGAAGTGCTTTGTATCTAGATGTGG
GCAGGACCCTTTCCAGCTGAGAAGATCTGAGACTGGGTCATGAACAGGTGGTTTCTGAGTGGGTCCTGTAAAAAT
GAATACGATTTTGATGATAGTAATGAGTAAGGACATTTGAGACTGATAGAAGAGTACATACAATATGTAGTGATG
GGGAAAGATAAGGTACTGTCAAAGGACAATGTGTTTTCTGGTATGACAGAGAAGTAGAATGTGTTAAGGGAAGCC
GAGTACCAGAAAGATCCGGGTGTCACAGTTTGTGTAGGGTGTTTAAAGCTAAACCACAGAGTTTAATTTTATCCA
ATAGAAGAGGAGCCACAGAAGAGTTTCCATTTATTCATTAATTTATTCATTTATTCAAAAAATATTTGAGTGCTT
ATTATAAGCCAGGTACTATGCCAGGCACCTGGGATAAGACATAGTCCCTTCTGTCAAGTCTTTACATTGGGTGGA
TGTGGGAGGGACAGATGACAGAACAATATGCATTGAGTGTAAGTGCTATGGTATAGGAAGCTCTGAGTGGGAGGG
GCATGGAAGCCGTGGAAGACCATGGAAGGCTTCCCAGGAGAAGTGACGTCTGGACTGATCCTTTGGTCAAGCAGG
AGTTAAAGAGGAGAAAAGGAGAGATATGGGTGTTCCCGAGAGAGGAAGAAGCCTTGTCCCAGGAGCAAAGTGAGG
GTGATTGTTCCAGAAATGTGAGTGATTCTTTTAAGGCTCAAGCAAAGCATGTGATTCTTCTTTATACCTTCTATT
TCTTTGCTGAGTGTTTCTGTTCTTTTGTTTCAAGCATGCTGCAATTGCTCATTAAAGCATGTTTATGATGGCTGT
CTGTTTTAAAATTCTTGTCAGATGGTTTCAACATCTTTATCATCTCAATGTTGGCATCTGTTAATGGTTTTTTCT
CAATCAAATTGAGATTTTCCTGGTTCTTGGTATTACCAGTGATTTTAATTGCATCTGGAAATTTGGGATTTATGT
TGAAAGACTGGATCTTATTGAAAGATTCTGTTTAGCACCCCTCCTTTGATACCACACTGGTGGGTCCAGGTTCCC
CATTCAGCTGTTGACACCTTCAGGGCAGAGAGGTGGGATGGGGTGAAGGGGGTACCTCATTATTGCTGGCCCAGG
TTAGAAGTTCAGGCTTCCCAGTAGATCTCTGCTGATACCACCCTGGTGCCATGTCATTCCTTGAGTCCAAAAGTC
CCTCCCAATTCTGCCTTCTTCTCTCTACATATCGGAGTCTCCCTATGTTTGACTTATATATAATGTCCAGGGTTT
TTAGAGTTAGTTAACAGGAGGCATAAGAAAAAGTGTGTCCACTCCATCTTGTCTGGAACTGGAAGTTCAAGTCGA
ATATAAGAGAGAGGAGAGGAAATTACAAGCCATGAGACTGGAGAGTTAGGCAGGTTCTACACCAGCTATTCTCAA
AGCCCTCTTACACTCTTAAAAATTTAGAACTTCAAAGAGCTTTTGATTTTGAAAGTTACATCTATCAATTATTAC
TGTTTCAAAAATTAAAATTGAGAAAATTTTATTTATTAATTTGTTTAAAAATAACAATAATTATTCAATTACATG
ATAATGTAAGTAATGCTTTTCTTAATGAAAAATAATTATATTTTCCAAAACAAAAACAATTAGGAAAAAGAGTGT
CATTGTTTTAGACTTTGGTAAATCTCTCTAATATCTGGCTGAAGAGAAGAATGCTGATTCTTTTTTTTTTTTTTT
TTTTTTGAGACGGAGTCTCGCTCTGTCACCCAGGCTGGAGTGTAGTGGTGTGATCTCGGCTCACTGCAAGCTCTG
CCTCCCGGGTTCACGCCATTCTCCTGCCTCAGCCTCCCAAGTAGCTGGGACTACAGGCACCCGCCACCACGCCCG
GCTAATTTTTTTGTATTTTTAGTAGAGATGGGGTTTCACCGTGTTAGCCAGGCTGGTCTCGATCTCCTGACCTCA
TGATCCACCCACCTCAGCCTCCCAAAGCGCTGGGATTACAGGTGTGAGACACCGCGCCCAGCCCCCGAATGCTGA
TTCTTTTATCTGCTTCTGTATTCAATCTGTTGTGATATGATGGGTAGCCTCTGAAACACTCCACTGTATACTTGT
GAAAGAATGAATGTGAAAAAGGAAAATAGATTTGTAGTATTATTATTCAAATTGTTTTGACCTCAGAGACCACTT
GGAAATGTTTTAGGGAACCCCCAGAGGACCTTGGATCATGCTTTGAGAACCGCGGCTCTAGATATGTTACTATTT
CAGTAGCATCTAAGTACATGTGGCTGCTGAGCACTTGTAATGTGGCTAGTGCAAATGAGAGACAGGACTTCCAGC
TATATGTAATTTAATAAACTCAAATTTAAAAACTGGAACCTCATAAAATGTTTTGTTGTTGTTGTTAAACATGAC
CTTATAGTTTTGGTAGGAA

[0112] By “Stem Cell Factor (SCF) polypeptide” is meant a polypeptide or fragment thereof having at least about 95% amino acid sequence identity to an amino acid sequence provided at GenBank Accession No. NP_000890 that functions in hematopoiesis. In some embodiments, a SCF polypeptide or fragment thereof binds CD117. An exemplary SCF polypeptide sequence follows:

>NP_000890.1 kit ligand isoform b precursor
[Homo sapiens]
MKKTQTWILTCIYLQLLLFNPLVKTEGICRNRVTNNVKDVTKLVANLPKD
YMITLKYVPGMDVLPSHCWISEMVVQLSDSLTDLLDKFSNISEGLSNYSI
IDKLVNIVDDLVECVKENSSKDLKKSFKSPEPRLFTPEEFFRIFNRSIDA
FKDFVVASETSDCVVSSTLSPEKDSRVSVTKPFMLPPVAASSLRNDSSS
SNRKAKNPPGDSSLHWAAMALPALFSLIIGFAFGALYWKKRQPSLTRAVE
NIQINEEDNEISMLQEKEREFQEV

[0113] By “SCF polynucleotide” is meant a nucleic acid molecule that encodes a SCF polypeptide. An exemplary SCF polynucleotide sequence follows:

>NM_003994.5 Homo sapiens KIT ligand (KITLG), transcript variant a, mRNA
GGGCTTCGCTCGCCGCCTCGCGCCGAGACTAGAAGCGCTGCGGGAAGCAGGGACAGTGGAGAGGGCGCTG
CGCTCGGGCTACCCAATGCGTGGACTATCTGCCGCCGCTGTTCGTGCAATATGCTGGAGCTCCAGAACAG
CTAAACGGAGTCGCCACACCACTGTTTGTGCTGGATCGCAGCGCTGCCTTTCCTTATGAAGAAGACACAA
ACTTGGATTCTCACTTGCATTTATCTTCAGCTGCTCCTATTTAATCCTCTCGTCAAAACTGAAGGGATCT
GCAGGAATCGTGTGACTAATAATGTAAAAGACGTCACTAAATTGGTGGCAAATCTTCCAAAAGACTACAT
GATAACCCTCAAATATGTCCCCGGGATGGATGTTTTGCCAAGTCATTGTTGGATAAGCGAGATGGTAGTA
CAATTGTCAGACAGCTTGACTGATCTTCTGGACAAGTTTTCAAATATTTCTGAAGGCTTGAGTAATTATT
CCATCATAGACAAACTTGTGAATATAGTGGATGACCTTGTGGAGTGCGTGAAAGAAAACTCATCTAAGGA
TCTAAAAAAATCATTCAAGAGCCCAGAACCCAGGCTCTTTACTCCTGAAGAATTCTTTAGAATTTTTAAT
AGATCCATTGATGCCTTCAAGGACTTTGTAGTGGCATCTGAAACTAGTGATTGTGTGGTTTCTTCAACAT
TAAGTCCTGAGAAAGGGAAGGCCAAAAATCCCCCTGGAGACTCCAGCCTACACTGGGCAGCCATGGCATT
GCCAGCATTGTTTTCTCTTATAATTGGCTTTGCTTTTGGAGCCTTATACTGGAAGAAGAGACAGCCAAGT
CTTACAAGGGCAGTTGAAAATATACAAATTAATGAAGAGGATAATGAGATAAGTATGTTGCAAGAGAAAG
AGAGAGAGTTTCAAGAAGTGTAATTGTGGCTTGTATCAACACTGTTACTTTCGTACATTGGCTGGTAACA
GTTCATGTTTGCTTCATAAATGAAGCAGCTTTAAACAAATTCATATTCTGTCTGGAGTGACAGACCACAT
CTTTATCTGTTCTTGCTACCCATGACTTTATATGGATGATTCAGAAATTGGAACAGAATGTTTTACTGTG
AAACTGGCACTGAATTAATCATCTATAAAGAAGAACTTGCATGGAGCAGGACTCTATTTTAAGGACTGCG
GGACTTGGGTCTCATTTAGAACTTGCAGCTGATGTTGGAAGAGAAAGCACGTGTCTCAGACTGCATGTAC
CATTTGCATGGCTCCAGAAATGTCTAAATGCTGAAAAAACACCTAGCTTTATTCTTCAGATACAAACTGC
AGCCTGTAGTTATCCTGGTCTCTGCAAGTAGATTTCAGCTTGGATAGTGAGGGTAACAATTTTTCTCAAA
GGGATCTGGAAAAAATGTTTAAAACTCAGTAGTGTCAGCCACTGTACAGTGTAGAAAGCAGTGGGAACTG
TGATTGGATTTGGCAACATGTCAGCTTTATAGTTGCCGATTAGTGATATGGGTCTGATTTCGATCTCTTC
CTGATGTAAACCATGCTCACCCATATCCCACTATACAAATGCAAATGGTTGCCTGGTTCCATTTATGCAA
GGGAGCCAGTACTGAATTATGCCTTGGCAGAGGGGAGACTCCAAAAGAGTCATCGCAGGAAGAAGTTAAG
AACACTGAACATCAGAACAGTCTGCCAAGAAGGACATTGGCATCCTGGGAAAGTCCGCCTTTTCCCTTGA
CCACTATAGGGTGTATAAATCGTGTTTGCAAAATGTGTTATGATGTGTTTATATTCTAAAACTATTACAG
AGCTATGTAAAGGGACTTAGGAGAAAATGCTGAATGTAAGATGGTCCCATTTCAATTTCCACCATGGGAG
AGCCTAAAAATAAATTATGACATTTAGTATCTAAGGTTAGAAAACCACGCCCACATGCTAATATGGGTGT
TGAAAACTAGGTTACTTATAATGCAAGGAATCAGGAAACTTTAGTTATTTATAGTATAATCACCATTATC
TGTTTAAAGGATCCATTTAGTTAAAATCGGGCACTCTATATTCATTAAGGTTTATGAATTAAAAAGAAAG
CTTTATGTAGTTATGCATGTCAGTTTGCTATTTAAAATGTGTGACAGTGTTTGTCATATTAAGAGTGAAT
TTGGCAGGAATTCCCAAGATGGACATTGTGCTTTTAAACTAGAACTTGTAAGACATTATGTGAATATCCC
TTGCCAATTTTTTTTATAATAAGAAAACATCTGACTAAAGTCAAAGAATGATTTCTTATGGTTTATTTTG
ATGAAAGTTCTTTTAACATGTCTTGAATGTACACATAAAGGAATCCAAAGCTTTCCATTCTAACTTAATC
TTTGTGATAACATTATTGCCATGTTCTACAACCGTAAGATGACAGTTTTCAATGTAGTGACACAAAAGGG
CATGAAAAACTAACTGCTAGCTTTCCTTTCATTTCAAAAGTCCAAGAATTTCTAGTATATTTGGATTTTA
GCTTCTGTTCAAAGCAAATCCAGATGCAACTCCAGTAAGTGGCCTTTGCTCTTTTTTGTACCAAAGAGCC
CAGATGATTCCTACAGTCCCTTTCTTCTCTAACATGCTGTGGTTCCTTAAATATGAGTAATTTCTCTAAG
ATATAACCCAGGTGCTTTGAGAAGCTGCATTAAGGTGTTCAGGCCCTCAGATATCACATGGTACACTTGA
TTAGTAATAAAACCAGAGATCAATTTAAATTGCTGATAGGTCCTGTCTCAGTGTGTGGCATTGACTGTTT
TCAGGAAAATAGATACAGATTAATATGAGTTATGCGTGTAGGTTGTGTATAGATTGAGAAGATAGATACT
TCTCAATCTAGTAGTTTGATTTATTTAACCAATGGTTTCAGTTTGCTTGAGCATATGAAAATCCTGCTTA
ATGTGCTTAAGAGTATAATAAATGTGTACTTTTGTCCTCAAACCTAGTAGCTGGGTTTTAACACTCATGG
ACATGGTCTTAATCAATGGAGTTAAATAAACAAATTCAGCAAGTTATTAAATCTGACATGGTAGGAGAGG
GGAGATGTGTCCTGCTTATTAAATGTGTTGGTCCATTGAAAGTTACATGGATTGCCAATTTTTAAAACAC
TAAAGTTGAATAAAATGCATGAACAATAGAAAAATGCTGAACATTATTTTGGATGCTAGCTGCTTGGACA
TTAACTGTGTTATTTCTGCTTTGAGATGAAAATATATATTTATCTTTGCTTATTTTATCCCAGATGTGTT
CTGAATATCCTTCTTCATAAATCATGGAAAACTCACTGCTGAGATAGTAAACCATGAAATCGCCTTTTCA
GTTGGTGCCATGTATCTGACAGTTCCATCTTGGAAGGTTTCAAAATTACCTTTTAAAATGATCTCAGAAG
TCTGTAGATTCTCAATGATACTGAAAGCTTTGCACCTCTTTGGTAGAAACCAGGTCTATTTAGAAAATGG
CTTTATGATAAATGTTGCCTCCTGAGTGATAATGAAGTGTTCCTGGATATTGTATTGTAATTTAATGTGC
TTACCACACTGCCACATTTTAATGAGTCAGAGAAAAATTAATTTTTCTTCAATACAATAATAGAACAAGT
AGCCTATTCTCTTAAAAAGTATGTGAAAAGAAAATTATGAAAAAATATGCATACCTAATGAAGTATTGGT
TTTAGTAAGAATTAAATACATTTCATTGAGCTTTAAAGTACTTTGGAGAAACTTTGGGGCACGTTTTCCT
ACTCTAATTCAACTAAAGTTATAAATAAAGAGAAAAACTCATTCAGAAATCATGGATTTTAAAAATATTT
TACTGCAGCCAAGTTTTCATTTCAAAATGTAATTTCAGTTTGGAGCTTTTAGGCATTATGTATATTTAAA
AAATATATTCTTCAAAAATGCATTTTGGCATGGTGGGATGGATGTTGCAAAAGATATCCGGAGCCTCCAG
TCTGTCATTAACTGATATGGTAAATCACCTCTCTTCTTTGGGTCTCAATTTTTTATTTATCTATATGGTA
AACTCAGAGATCACTCCTTAGGGGTGAGTCCTATTGCAATATGACCGACAAAGAAGACAAAATAGCATTG
AAACTAACCCATACAAAATATCCAACTCTGGATTCTGTGAATAAGTATCTTGACCATAAAAAGTCATTGC
TGTTCTTGTTTCTAATGTAAATAGTGTCCATTAGTAAAAGTGAAATTCAGTCTTAAGTAGGGTGAATTGG
ATCACCATTTACACAAGAGATGGCTTTTTCCTTTGCTTGAATAAACATTTTGGATCACCTCCAAAGAATG
AAAACCAGTAGTACGTTTTAGTCATATTAGTCAGGATGAGAAACTATAAGATGTGTGTAACATTTGGAAA
TGCACCAAAGTGAGCGTTTAAATCTTCTCATTTTATTGAAAACTAAGAGCAGAAAATGTAAAATGCTCAT
GAAGGTTTTGAATGCCAAAAGATATTTTAGAATCAATTTATAAAGGGGTAATTCATTAATTACACTTTAA
AATTGGAAAGTGGGATAAGAAATCTAAAGTAAACCAGCTTATCTTTGAAACAATATTATTTTGAAATTGG
CTTTAAAATAAAACCATTCAGATTGAAATTCTAATTAGCTCATTTGTGGAGTTTGATCACACAATTCATA
ATGTTGCTGCTTTCCATTAACTAGTCTTGAAATGCCTTTGTTTGTAAAAATAAAATAATGGTACTTTCAT
TTTATAACAAGGTGTTTTTTTCAAGAAATAATCCATGCTAAAATGGATATTTGTGATCCTGAAATGTTTA
CTAAGCATTGTAAATTTATTTATAACTGCCATCTCCAACTACATCCTTATGATGTTTTTAACAATAAAAT
TAAAACAACTGTTAAACTAAAAACCACACCGTTTTCCAGTACTTGATCTCTGAGCTACAATACTCACTAA
ATATAATTTTCCAATCAAAATATTCTATTCTATATTCTAAGGGTTAATATGTGATTATAGTGTCCACTTG
CCACCATTTTTTTAAATCAATGGACTTGAAAAGTATTAATTTAGATGGATGCGCAGATATACCCTCAGTT
CAGTCATAGATTGGAGTTTGCATATAATAATGTAAATGTATGTCGACACTATTCTAAATAGTTCTATTAT
GACTGAAATTTAATTAAATAAAAAAGGTTGTAAAATGTGATGTGTATGTGTATATACTGTATGTGTACTT
TTTAAAATAGGTGTATGTCCCAACCCTTTTTTATACAGGTTTGAATTTAAAATTACATGATATATACATA
TACTTTATTGTTCTAAATAAAGAATTTTATGCACTCTCAAAAAAAAAAAAAAAAAA

[0114] The term “linker”, as used herein, can refer to a covalent linker (e.g., covalent bond), a non-covalent linker, a chemical group, or a molecule linking two molecules or moieties, e.g., two components of a protein complex or a ribonucleocomplex, or two domains of a fusion protein, such as, for example, a polynucleotide programmable DNA binding domain (e.g., dCas9) and a deaminase domain ((e.g., an adenosine deaminase, a cytidine deaminase, or an adenosine deaminase and a cytidine deaminase). A linker can join different components of, or different portions of components of, a base editor system. For example, in some embodiments, a linker can join a guide polynucleotide binding domain of a polynucleotide programmable nucleotide binding domain and a catalytic domain of a deaminase. In some embodiments, a linker can join a CRISPR polypeptide and a deaminase. In some embodiments, a linker can join a Cas9 and a deaminase. In some embodiments, a linker can join a dCas9 and a deaminase. In some embodiments, a linker can join a nCas9 and a deaminase. In some embodiments, a linker can join a guide polynucleotide and a deaminase. In some embodiments, a linker can join a deaminating component and a polynucleotide programmable nucleotide binding component of a base editor system. In some embodiments, a linker can join a RNA-binding portion of a deaminating component and a polynucleotide programmable nucleotide binding component of a base editor system. In some embodiments, a linker can join a RNA-binding portion of a deaminating component and a RNA-binding portion of a polynucleotide programmable nucleotide binding component of a base editor system. A linker can be positioned between, or flanked by, two groups, molecules, or other moieties and connected to each one via a covalent bond or non-covalent interaction, thus connecting the two. In some embodiments, the linker can be an organic molecule, group, polymer, or chemical moiety. In some embodiments, the linker can be a polynucleotide. In some embodiments, the linker can be a DNA linker. In some embodiments, the linker can be a RNA linker. In some embodiments, a linker can comprise an aptamer capable of binding to a ligand. In some embodiments, the ligand may be carbohydrate, a peptide, a protein, or a nucleic acid. In some embodiments, the linker may comprise an aptamer may be derived from a riboswitch. The riboswitch from which the aptamer is derived may be selected from a theophylline riboswitch, a thiamine pyrophosphate (TPP) riboswitch, an adenosine cobalamin (AdoCbl) riboswitch, an S-adenosyl methionine (SAM) riboswitch, an SAH riboswitch, a flavin mononucleotide (FMN) riboswitch, a tetrahydrofolate riboswitch, a lysine riboswitch, a glycine riboswitch, a purine riboswitch, a GlmS riboswitch, or a pre-queosinel (PreQ1) riboswitch. In some embodiments, a linker may comprise an aptamer bound to a polypeptide or a protein domain, such as a polypeptide ligand. In some embodiments, the polypeptide ligand may be a K Homology (KH) domain, a MS2 coat protein domain, a PP7 coat protein domain, a SfMu Com coat protein domain, a sterile alpha motif, a telomerase Ku binding motif and Ku protein, a telomerase Sm7 binding motif and Sm7 protein, or a RNA recognition motif. In some embodiments, the polypeptide ligand may be a portion of a base editor system component. For example, a nucleobase editing component may comprise a deaminase domain and a RNA recognition motif.

[0115] In some embodiments, the linker can be an amino acid or a plurality of amino acids (e.g., a peptide or protein). In some embodiments, the linker can be about 5-100 amino acids in length, for example, about 5, 6, 7, 8, 9, 10, 11, 12, 13, 14, 15, 16, 17, 18, 19, 20, 20-30, 30-40, 40-50, 50-60, 60-70, 70-80, 80-90, or 90-100 amino acids in length. In some embodiments, the linker can be about 100-150, 150-200, 200-250, 250-300, 300-350, 350-400, 400-450, or 450-500 amino acids in length. Longer or shorter linkers can be also contemplated.

[0116] In some embodiments, a linker joins a gRNA binding domain of an RNA-programmable nuclease, including a Cas9 nuclease domain, and the catalytic domain of a nucleic-acid editing protein (e.g., cytidine or adenosine deaminase). In some embodiments, a linker joins a dCas9 and a nucleic-acid editing protein. For example, the linker is positioned between, or flanked by, two groups, molecules, or other moieties and connected to each one via a covalent bond, thus connecting the two. In some embodiments, the linker is an amino acid or a plurality of amino acids (e.g., a peptide or protein). In some embodiments, the linker is an organic molecule, group, polymer, or chemical moiety. In some embodiments, the linker is 5-200 amino acids in length, for example, 5, 6, 7, 8, 9, 10, 11, 12, 13, 14, 15, 16, 17, 18, 19, 20, 25, 35, 45, 50, 55, 60, 60, 65, 70, 70, 75, 80, 85, 90, 90, 95, 100, 101, 102, 103, 104, 105, 110, 120, 130, 140, 150, 160, 175, 180, 190, or 200 amino acids in length.

[0117] In some embodiments, the domains of a base editor are fused via a linker that comprises the amino acid sequence of SGGSSGSETPGTSESATPESSGGS, SGGSSGGSSGSETPGTSESATPESSGGSSGGS, or GGSGGSPGSPAGSPTSTEEGTSESATPESGPGTSTEPSEGSAPGSPAGSPTSTEEGTSTE PSEGSAPGTSTEPSEGSAPGTSESATPESGPGSEPATSGGSGGS. In some embodiments, domains of the base editor are fused via a linker comprising the amino acid sequence SGSETPGTSESATPES, which may also be referred to as the XTEN linker. In some embodiments, the linker is 24 amino acids in length. In some embodiments, the linker comprises the amino acid sequence SGGSSGGSSGSETPGTSESATPES. In some embodiments, the linker is 40 amino acids in length. In some embodiments, the linker comprises the amino acid sequence SGGSSGGSSGSETPGTSESATPESSGGSSGGSSGGSSGGS. In some embodiments, the linker is 64 amino acids in length. In some embodiments, the linker comprises the amino acid sequence SGGSSGGSSGSETPGTSESATPESSGGSSGGSSGGSSGGSSGSETPGTSESATPESSGGSSG GS. In some embodiments, the linker is 92 amino acids in length. In some embodiments, the linker comprises the amino acid sequence

PGSPAGSPTSTEEGTSESATPESGPGTSTEPSEGSAPGSPAGSPTSTEEG
TSTEPSEGSAPGTSTEPSEGSAPGTSESATPESGPGSEPATS.

[0118] “Makassar” or “Hb G-Makassar” refers to a human β-hemoglobin variant, the human Hemoglobin (Hb) of G-Makassar variant or mutation (HB Makassar variant), which is an asymptomatic, naturally-occurring variant (E6A) hemoglobin. Hb G-Makassar was first identified in Indonesia. (Mohamad, A. S. et al., 2018, Hematol. Rep., 10(3):7210 (doi:10.4081/hr.2018.7210). The Hb G-Makassar mobility is slower when subjected to electrophoresis. The Makassar β-hemoglobin variant has its anatomical abnormality at the β-6 or A3 location where the glutamyl residue typically is replaced by an alanyl residue. The substitution of single amino acid in the gene encoding the β-globin subunit β-6 glutamyl to valine will result as sickle cell disease. Routine procedures, such as isoelectric focusing, hemoglobin electrophoresis separation by cation-exchange High Performance Liquid Chromatography (HPLC) and cellulose acetate electrophoresis, have been unable to separate the Hb G-Makassar and HbS globin forms, as they were found to have identical properties when analyzed by these methods. Consequently, Hb G-Makassar and HbS have been incorrectly identified and mistaken for each other by those skilled in the art, thus leading to misdiagnosis of Sickle Cell Disease (SCD). In one embodiment, the valine at amino acid position 6, which causes sickle cell disease, is replaced with an alanine, to thereby generate an Hb variant (Hb Makassar) that does not generate a sickle cell phenotype. In some embodiments, a Val 4 Ala (GTG 4 GCG) replacement (i.e., the Hb Makassar variant) can be generated using an A•T to G•C base editor (ABE).

[0119] Thus, the present invention includes compositions and methods for base editing a thymidine (T) to a cytidine (C) in the codon of the sixth amino acid of a sickle cell disease variant of the β-globin protein (Sickle HbS; E6V), thereby substituting an alanine for a valine (V6A) at this amino acid position. Substitution of alanine for valine at position 6 of HbS generates a β-globin protein variant that does not have a sickle cell phenotype (e.g., does not have the potential to polymerize as in the case of the pathogenic variant HbS). Accordingly, the compositions and methods of the invention are useful for the treatment of sickle cell disease (SCD).

[0120] By “marker” is meant any protein or polynucleotide having an alteration in expression level or activity that is associated with a disease or disorder.

[0121] The term “mutation,” as used herein, refers to a substitution of a residue within a sequence, e.g., a nucleic acid or amino acid sequence, with another residue, or a deletion or insertion of one or more residues within a sequence. Mutations are typically described herein by identifying the original residue followed by the position of the residue within the sequence and by the identity of the newly substituted residue. Various methods for making the amino acid substitutions (mutations) provided herein are well known in the art, and are provided by, for example, Green and Sambrook, Molecular Cloning: A Laboratory Manual (4th ed., Cold Spring Harbor Laboratory Press, Cold Spring Harbor, N.Y. (2012)).

[0122] In some embodiments, the presently disclosed base editors can efficiently generate an “intended mutation”, such as a point mutation, in a nucleic acid (e.g., a nucleic acid within a genome of a subject) without generating a significant number of unintended mutations, such as unintended point mutations. In some embodiments, an intended mutation is a mutation that is generated by a specific base editor (e.g., cytidine base editor or adenosine base editor) bound to a guide polynucleotide (e.g., gRNA), specifically designed to generate the intended mutation.

[0123] In general, mutations made or identified in a sequence (e.g., an amino acid sequence as described herein) are numbered in relation to a reference (or wild type) sequence, i.e., a sequence that does not contain the mutations. The skilled practitioner in the art would readily understand how to determine the position of mutations in amino acid and nucleic acid sequences relative to a reference sequence.

[0124] The term “non-conservative mutations” involve amino acid substitutions between different groups, for example, lysine for tryptophan, or phenylalanine for serine, etc. In this case, it is preferable for the non-conservative amino acid substitution to not interfere with, or inhibit the biological activity of, the functional variant. The non-conservative amino acid substitution can enhance the biological activity of the functional variant, such that the biological activity of the functional variant is increased as compared to the wild-type protein.

[0125] The term “nuclear localization sequence,” “nuclear localization signal,” or “NLS” refers to an amino acid sequence that promotes import of a protein into the cell nucleus. Nuclear localization sequences are known in the art and described, for example, in Plank et al., International PCT application, PCT/EP2000/011690, filed Nov. 23, 2000, published as WO/2001/038547 on May 31, 2001, the contents of which are incorporated herein by reference for their disclosure of exemplary nuclear localization sequences. In other embodiments, the NLS is an optimized NLS described, for example, by Koblan et al., Nature Biotech. 2018 doi:10.1038/nbt.4172. In some embodiments, an NLS comprises the amino acid sequence KRTADGSEFESPKKKRKV, KRPAATKKAGQAKKKK, KKTELQTTNAENKTKKL, KRGINDRNFWRGENGRKTR, RKSGKIAAIVVKRPRK, PKKKRKV, or MDSLLMNRRKFLYQFKNVRWAKGRRETYLC.

[0126] The term “nucleobase,” “nitrogenous base,” or “base,” used interchangeably herein, refers to a nitrogen-containing biological compound that forms a nucleoside, which in turn is a component of a nucleotide. The ability of nucleobases to form base pairs and to stack one upon another leads directly to long-chain helical structures such as ribonucleic acid (RNA) and deoxyribonucleic acid (DNA). Five nucleobases—adenine (A), cytosine (C), guanine (G), thymine (T), and uracil (U)—are called primary or canonical. Adenine and guanine are derived from purine, and cytosine, uracil, and thymine are derived from pyrimidine. DNA and RNA can also contain other (non-primary) bases that are modified. Non-limiting exemplary modified nucleobases can include hypoxanthine, xanthine, 7-methylguanine, 5,6-dihydrouracil, 5-methylcytosine (m5C), and 5-hydromethylcytosine. Hypoxanthine and xanthine can be created through mutagen presence, both of them through deamination (replacement of the amine group with a carbonyl group). Hypoxanthine can be modified from adenine. Xanthine can be modified from guanine. Uracil can result from deamination of cytosine. A “nucleoside” consists of a nucleobase and a five carbon sugar (either ribose or deoxyribose). Examples of a nucleoside include adenosine, guanosine, uridine, cytidine, 5-methyluridine (m5U), deoxyadenosine, deoxyguanosine, thymidine, deoxyuridine, and deoxycytidine. Examples of a nucleoside with a modified nucleobase includes inosine (I), xanthosine (X), 7-methylguanosine (m7G), dihydrouridine (D), 5-methylcytidine (m5C), and pseudouridine (ψ). A “nucleotide” consists of a nucleobase, a five carbon sugar (either ribose or deoxyribose), and at least one phosphate group.

[0127] The terms “nucleic acid” and “nucleic acid molecule,” as used herein, refer to a compound comprising a nucleobase and an acidic moiety, e.g., a nucleoside, a nucleotide, or a polymer of nucleotides. Typically, polymeric nucleic acids, e.g., nucleic acid molecules comprising three or more nucleotides are linear molecules, in which adjacent nucleotides are linked to each other via a phosphodiester linkage. In some embodiments, “nucleic acid” refers to individual nucleic acid residues (e.g. nucleotides and/or nucleosides). In some embodiments, “nucleic acid” refers to an oligonucleotide chain comprising three or more individual nucleotide residues. As used herein, the terms “oligonucleotide” and “polynucleotide” can be used interchangeably to refer to a polymer of nucleotides (e.g., a string of at least three nucleotides). In some embodiments, “nucleic acid” encompasses RNA as well as single and/or double-stranded DNA. Nucleic acids may be naturally occurring, for example, in the context of a genome, a transcript, an mRNA, tRNA, rRNA, siRNA, snRNA, a plasmid, cosmid, chromosome, chromatid, or other naturally occurring nucleic acid molecule. On the other hand, a nucleic acid molecule may be a non-naturally occurring molecule, e.g., a recombinant DNA or RNA, an artificial chromosome, an engineered genome, or fragment thereof, or a synthetic DNA, RNA, DNA/RNA hybrid, or including non-naturally occurring nucleotides or nucleosides. Furthermore, the terms “nucleic acid,” “DNA,” “RNA,” and/or similar terms include nucleic acid analogs, e.g., analogs having other than a phosphodiester backbone. Nucleic acids can be purified from natural sources, produced using recombinant expression systems and optionally purified, chemically synthesized, etc. Where appropriate, e.g., in the case of chemically synthesized molecules, nucleic acids can comprise nucleoside analogs such as analogs having chemically modified bases or sugars, and backbone modifications. A nucleic acid sequence is presented in the 5′ to 3′ direction unless otherwise indicated. In some embodiments, a nucleic acid is or comprises natural nucleosides (e.g. adenosine, thymidine, guanosine, cytidine, uridine, deoxyadenosine, deoxythymidine, deoxyguanosine, and deoxycytidine); nucleoside analogs (e.g., 2-aminoadenosine, 2-thiothymidine, inosine, pyrrolo-pyrimidine, 3-methyl adenosine, 5-methylcytidine, 2-aminoadenosine, C5-bromouridine, C5-fluorouridine, C5-iodouridine, C5-propynyl-uridine, C5-propynyl-cytidine, C5-methylcytidine, 2-aminoadenosine, 7-deazaadenosine, 7-deazaguanosine, 8-oxoadenosine, 8-oxoguanosine, 0(6)-methylguanine, and 2-thiocytidine); chemically modified bases; biologically modified bases (e.g., methylated bases); intercalated bases; modified sugars (2′-e.g., fluororibose, ribose, 2′-deoxyribose, arabinose, and hexose); and/or modified phosphate groups (e.g., phosphorothioates and 5′-N-phosphoramidite linkages).

[0128] The term “nucleic acid programmable DNA binding protein” or “napDNAbp” may be used interchangeably with “polynucleotide programmable nucleotide binding domain” to refer to a protein that associates with a nucleic acid (e.g., DNA or RNA), such as a guide nucleic acid or guide polynucleotide (e.g., gRNA), that guides the napDNAbp to a specific nucleic acid sequence. In some embodiments, the polynucleotide programmable nucleotide binding domain is a polynucleotide programmable DNA binding domain. In some embodiments, the polynucleotide programmable nucleotide binding domain is a polynucleotide programmable RNA binding domain. In some embodiments, the polynucleotide programmable nucleotide binding domain is a Cas9 protein. A Cas9 protein can associate with a guide RNA that guides the Cas9 protein to a specific DNA sequence that is complementary to the guide RNA. In some embodiments, the napDNAbp is a Cas9 domain, for example a nuclease active Cas9, a Cas9 nickase (nCas9), or a nuclease inactive Cas9 (dCas9). Non-limiting examples of nucleic acid programmable DNA binding proteins include, Cas9 (e.g., dCas9 and nCas9), Cas12a/Cpf1, Cas12b/C2c1, Cas12c/C2c3, Cas12d/CasY, Cas12e/CasX, Cas12g, Cas12h, Cas12i, and Cas12j/CasΦ. Non-limiting examples of Cas enzymes include Cas1, Cas1B, Cas2, Cas3, Cas4, Cas5, CasSd, CasSt, CasSh, CasSa, Cas6, Cas7, Cas8, Cas8a, Cas8b, Cas8c, Cas9 (also known as Csn1 or Csx12), Cas10, Cas10d, Cas12a/Cpf1, Cas12b/C2c1, Cas12c/C2c3, Cas12d/CasY, Cas12e/CasX, Cas12g, Cas12h, Cas12i, Cas12j/CasΦ, Csy1, Csy2, Csy3, Csy4, Cse1, Cse2, Cse3, Cse4, CseSe, Csc1, Csc2, Csa5, Csn1, Csn2, Csm1, Csm2, Csm3, Csm4, Csm5, Csm6, Cmr1, Cmr3, Cmr4, Cmr5, Cmr6, Csb1, Csb2, Csb3, Csx17, Csx14, Csx10, Csx16, CsaX, Csx3, Csx1, Csx1S, Csx11, Csf1, Csf2, CsO, Csf4, Csd1, Csd2, Cst1, Cst2, Csh1, Csh2, Csa1, Csa2, Csa3, Csa4, Csa5, Type II Cas effector proteins, Type V Cas effector proteins, Type VI Cas effector proteins, CARF, DinG, homologues thereof, or modified or engineered versions thereof. Other nucleic acid programmable DNA binding proteins are also within the scope of this disclosure, although they may not be specifically listed in this disclosure. See, e.g., Makarova et al. “Classification and Nomenclature of CRISPR-Cas Systems: Where from Here?” CRISPR J. 2018 October; 1:325-336. doi: 10.1089/crispr.2018.0033; Yan et al., “Functionally diverse type V CRISPR-Cas systems” Science. 2019 Jan. 4; 363(6422):88-91. doi: 10.1126/science.aav7271, the entire contents of each are hereby incorporated by reference.

[0129] The terms “nucleobase editing domain” or “nucleobase editing protein,” as used herein, refers to a protein or enzyme that can catalyze a nucleobase modification in RNA or DNA, such as cytosine (or cytidine) to uracil (or uridine) or thymine (or thymidine), and adenine (or adenosine) to hypoxanthine (or inosine) deaminations, as well as non-templated nucleotide additions and insertions. In some embodiments, the nucleobase editing domain is a deaminase domain (e.g., an adenine deaminase or an adenosine deaminase; or a cytidine deaminase or a cytosine deaminase). In some embodiments, the nucleobase editing domain is more than one deaminase domain (e.g., an adenine deaminase or an adenosine deaminase and a cytidine or a cytosine deaminase). In some embodiments, the nucleobase editing domain can be a naturally occurring nucleobase editing domain. In some embodiments, the nucleobase editing domain can be an engineered or evolved nucleobase editing domain from the naturally occurring nucleobase editing domain. The nucleobase editing domain can be from any organism, such as a bacterium, human, chimpanzee, gorilla, monkey, cow, dog, rat, or mouse.

[0130] As used herein, “obtaining” as in “obtaining an agent” includes synthesizing, purchasing, or otherwise acquiring the agent.

[0131] A “patient” or “subject” as used herein refers to a mammalian subject or individual diagnosed with, at risk of having or developing, or suspected of having or developing a disease or a disorder. In some embodiments, the term “patient” refers to a mammalian subject with a higher than average likelihood of developing a disease or a disorder. Exemplary patients can be humans, non-human primates, cats, dogs, pigs, cattle, cats, horses, camels, llamas, goats, sheep, rodents (e.g., mice, rabbits, rats, or guinea pigs) and other mammalians that can benefit from the therapies disclosed herein. Exemplary human patients can be male and/or female.

[0132] “Patient in need thereof” or “subject in need thereof” is referred to herein as a patient diagnosed with, at risk or having, predetermined to have, or suspected of having a disease or disorder.

[0133] The terms “pathogenic mutation”, “pathogenic variant”, “disease casing mutation”, “disease causing variant”, “deleterious mutation”, or “predisposing mutation” refers to a genetic alteration or mutation that increases an individual's susceptibility or predisposition to a certain disease or disorder. In some embodiments, the pathogenic mutation comprises at least one wild-type amino acid substituted by at least one pathogenic amino acid in a protein encoded by a gene.

[0134] The terms “protein”, “peptide”, “polypeptide”, and their grammatical equivalents are used interchangeably herein, and refer to a polymer of amino acid residues linked together by peptide (amide) bonds. The terms refer to a protein, peptide, or polypeptide of any size, structure, or function. Typically, a protein, peptide, or polypeptide will be at least three amino acids long. A protein, peptide, or polypeptide can refer to an individual protein or a collection of proteins. One or more of the amino acids in a protein, peptide, or polypeptide can be modified, for example, by the addition of a chemical entity such as a carbohydrate group, a hydroxyl group, a phosphate group, a farnesyl group, an isofarnesyl group, a fatty acid group, a linker for conjugation, functionalization, or other modifications, etc. A protein, peptide, or polypeptide can also be a single molecule or can be a multi-molecular complex. A protein, peptide, or polypeptide can be just a fragment of a naturally occurring protein or peptide. A protein, peptide, or polypeptide can be naturally occurring, recombinant, or synthetic, or any combination thereof. The term “fusion protein” as used herein refers to a hybrid polypeptide which comprises protein domains from at least two different proteins. One protein can be located at the amino-terminal (N-terminal) portion of the fusion protein or at the carboxy-terminal (C-terminal) protein thus forming an amino-terminal fusion protein or a carboxy-terminal fusion protein, respectively. A protein can comprise different domains, for example, a nucleic acid binding domain (e.g., the gRNA binding domain of Cas9 that directs the binding of the protein to a target site) and a nucleic acid cleavage domain, or a catalytic domain of a nucleic acid editing protein. In some embodiments, a protein comprises a proteinaceous part, e.g., an amino acid sequence constituting a nucleic acid binding domain, and an organic compound, e.g., a compound that can act as a nucleic acid cleavage agent. In some embodiments, a protein is in a complex with, or is in association with, a nucleic acid, e.g., RNA or DNA. Any of the proteins provided herein can be produced by any method known in the art. For example, the proteins provided herein can be produced via recombinant protein expression and purification, which is especially suited for fusion proteins comprising a peptide linker. Methods for recombinant protein expression and purification are well known, and include those described by Green and Sambrook, Molecular Cloning: A Laboratory Manual (4th ed., Cold Spring Harbor Laboratory Press, Cold Spring Harbor, N.Y. (2012)), the entire contents of which are incorporated herein by reference.

[0135] Polypeptides and proteins disclosed herein (including functional portions and functional variants thereof) can comprise synthetic amino acids in place of one or more naturally-occurring amino acids. Such synthetic amino acids are known in the art, and include, for example, aminocyclohexane carboxylic acid, norleucine, α-amino n-decanoic acid, homoserine, S-acetylaminomethyl-cysteine, trans-3- and trans-4-hydroxyproline, 4-aminophenylalanine, 4-nitrophenylalanine, 4-chlorophenylalanine, 4-carboxyphenylalanine, β-phenylserine β-hydroxyphenylalanine, phenylglycine, α-naphthylalanine, cyclohexylalanine, cyclohexylglycine, indoline-2-carboxylic acid, 1,2,3,4-tetrahydroisoquinoline-3-carboxylic acid, aminomalonic acid, aminomalonic acid monoamide, N′-benzyl-N′-methyl-lysine, N′,N′-dibenzyl-lysine, 6-hydroxylysine, ornithine, α-aminocyclopentane carboxylic acid, α-aminocyclohexane carboxylic acid, α-aminocycloheptane carboxylic acid, α-(2-amino-2-norbornane)-carboxylic acid, α,γ-diaminobutyric acid, α,β-diaminopropionic acid, homophenylalanine, and α-tert-butylglycine. The polypeptides and proteins can be associated with post-translational modifications of one or more amino acids of the polypeptide constructs. Non-limiting examples of post-translational modifications include phosphorylation, acylation including acetylation and formylation, glycosylation (including N-linked and O-linked), amidation, hydroxylation, alkylation including methylation and ethylation, ubiquitylation, addition of pyrrolidone carboxylic acid, formation of disulfide bridges, sulfation, myristoylation, palmitoylation, isoprenylation, farnesylation, geranylation, glypiation, lipoylation and iodination.

[0136] The term “recombinant” as used herein in the context of proteins or nucleic acids refers to proteins or nucleic acids that do not occur in nature, but are the product of human engineering. For example, in some embodiments, a recombinant protein or nucleic acid molecule comprises an amino acid or nucleotide sequence that comprises at least one, at least two, at least three, at least four, at least five, at least six, or at least seven mutations as compared to any naturally occurring sequence.

[0137] By “reduces” is meant a negative alteration of at least 10%, 25%, 50%, 75%, or 100%.

[0138] By “reference” is meant a standard or control condition. In one embodiment, the reference is a wild-type or healthy cell. In other embodiments and without limitation, a reference is an untreated cell that is not subjected to a test condition, or is subjected to placebo or normal saline, medium, buffer, and/or a control vector that does not harbor a polynucleotide of interest.

[0139] A “reference sequence” is a defined sequence used as a basis for sequence comparison. A reference sequence may be a subset of or the entirety of a specified sequence; for example, a segment of a full-length cDNA or gene sequence, or the complete cDNA or gene sequence. For polypeptides, the length of the reference polypeptide sequence will generally be at least about 16 amino acids, at least about 20 amino acids, at least about 25 amino acids, about 35 amino acids, about 50 amino acids, or about 100 amino acids. For nucleic acids, the length of the reference nucleic acid sequence will generally be at least about 50 nucleotides, at least about 60 nucleotides, at least about 75 nucleotides, about 100 nucleotides or about 300 nucleotides or any integer thereabout or therebetween. In some embodiments, a reference sequence is a wild-type sequence of a protein of interest. In other embodiments, a reference sequence is a polynucleotide sequence encoding a wild-type protein.

[0140] The term “RNA-programmable nuclease,” and “RNA-guided nuclease” are used with (e.g., binds or associates with) one or more RNA(s) that is not a target for cleavage. In some embodiments, an RNA-programmable nuclease, when in a complex with an RNA, may be referred to as a nuclease:RNA complex. Typically, the bound RNA(s) is referred to as a guide RNA (gRNA). In some embodiments, the RNA-programmable nuclease is the (CRISPR-associated system) Cas9 endonuclease, for example, Cas9 (Csn1) from Streptococcus pyogenes (See, e.g., “Complete genome sequence of an Ml strain of Streptococcus pyogenes.” Ferretti J. J., McShan W. M., Ajdic D. J., Savic D. J., Savic G., Lyon K., Primeaux C, Sezate S., Suvorov A. N., Kenton S., Lai H. S., Lin S. P., Qian Y., Jia H. G., Najar F. Z., Ren Q., Zhu H., Song L., White J., Yuan X., Clifton S. W., Roe B. A., McLaughlin R. E., Proc. Natl. Acad. Sci. U.S.A. 98:4658-4663(2001); “CRISPR RNA maturation by trans-encoded small RNA and host factor RNase III.” Deltcheva E., Chylinski K., Sharma C M., Gonzales K., Chao Y., Pirzada Z. A., Eckert M. R., Vogel J., Charpentier E., Nature 471:602-607(2011).

[0141] As used herein, the term “scFv” refers to a single chain Fv antibody in which the variable domains of the heavy chain and the light chain from an antibody have been joined to form one chain. scFv fragments contain a single polypeptide chain that includes the variable region of an antibody light chain (VL) (e.g., CDR-L1, CDR-L2, and/or CDR-L3) and the variable region of an antibody heavy chain (VH) (e.g., CDR-H1, CDR-H2, and/or CDR-H3) separated by a linker. The linker that joins the VL and VH regions of a scFv fragment can be a peptide linker composed of proteinogenic amino acids. Alternative linkers can be used to so as to increase the resistance of the scFv fragment to proteolytic degradation (for example, linkers containing D-amino acids), in order to enhance the solubility of the scFv fragment (for example, hydrophilic linkers such as polyethylene glycol-containing linkers or polypeptides containing repeating glycine and serine residues), to improve the biophysical stability of the molecule (for example, a linker containing cysteine residues that form intramolecular or intermolecular disulfide bonds), or to attenuate the immunogenicity of the scFv fragment (for example, linkers containing glycosylation sites). It will also be understood by one of ordinary skill in the art that the variable regions of the scFv molecules described herein can be modified such that they vary in amino acid sequence from the antibody molecule from which they were derived. For example, nucleotide or amino acid substitutions leading to conservative substitutions or changes at amino acid residues can be made (e.g., in CDR and/or framework residues) so as to preserve or enhance the ability of the scFv to bind to the antigen recognized by the corresponding antibody.

[0142] By “selectively binds” is meant specifically binds a wild-type version of the cell surface protein, but exhibits reduced binding or fails to bind to the cell surface protein comprising a mutation.

[0143] The term “single nucleotide polymorphism (SNP)” is a variation in a single nucleotide that occurs at a specific position in the genome, where each variation is present to some appreciable degree within a population (e.g., >1%). For example, at a specific base position in the human genome, the C nucleotide can appear in most individuals, but in a minority of individuals, the position is occupied by an A. This means that there is a SNP at this specific position, and the two possible nucleotide variations, C or A, are said to be alleles for this position. SNPs underlie differences in susceptibility to disease. The severity of illness and the way our body responds to treatments are also manifestations of genetic variations. SNPs can fall within coding regions of genes, non-coding regions of genes, or in the intergenic regions (regions between genes). In some embodiments, SNPs within a coding sequence do not necessarily change the amino acid sequence of the protein that is produced, due to degeneracy of the genetic code. SNPs in the coding region are of two types: synonymous and nonsynonymous SNPs. Synonymous SNPs do not affect the protein sequence, while nonsynonymous SNPs change the amino acid sequence of protein. The nonsynonymous SNPs are of two types: missense and nonsense. SNPs that are not in protein-coding regions can still affect gene splicing, transcription factor binding, messenger RNA degradation, or the sequence of noncoding RNA. Gene expression affected by this type of SNP is referred to as an eSNP (expression SNP) and can be upstream or downstream from the gene. A single nucleotide variant (SNV) is a variation in a single nucleotide without any limitations of frequency and can arise in somatic cells. A somatic single nucleotide variation can also be called a single-nucleotide alteration.

[0144] By “specifically binds” is meant a nucleic acid molecule, polypeptide, or complex thereof (e.g., a nucleic acid programmable DNA binding domain and guide nucleic acid), compound, or molecule that recognizes and binds a polypeptide and/or nucleic acid molecule of the invention, but which does not substantially recognize and bind other molecules in a sample, for example, a biological sample.

[0145] Nucleic acid molecules useful in the methods of the invention include any nucleic acid molecule that encodes a polypeptide of the invention or a fragment thereof. Such nucleic acid molecules need not be 100% identical with an endogenous nucleic acid sequence, but will typically exhibit substantial identity. Polynucleotides having “substantial identity” to an endogenous sequence are typically capable of hybridizing with at least one strand of a double-stranded nucleic acid molecule. Nucleic acid molecules useful in the methods of the invention include any nucleic acid molecule that encodes a polypeptide of the invention or a fragment thereof. Such nucleic acid molecules need not be 100% identical with an endogenous nucleic acid sequence, but will typically exhibit substantial identity. Polynucleotides having “substantial identity” to an endogenous sequence are typically capable of hybridizing with at least one strand of a double-stranded nucleic acid molecule.

[0146] By “hybridize” is meant pair to form a double-stranded molecule between complementary polynucleotide sequences (e.g., a gene described herein), or portions thereof, under various conditions of stringency. (See, e.g., Wahl, G. M. and S. L. Berger (1987) Methods Enzymol. 152:399; Kimmel, A. R. (1987) Methods Enzymol. 152:507).

[0147] For example, stringent salt concentration will ordinarily be less than about 750 mM NaCl and 75 mM trisodium citrate, preferably less than about 500 mM NaCl and 50 mM trisodium citrate, and more preferably less than about 250 mM NaCl and 25 mM trisodium citrate. Low stringency hybridization can be obtained in the absence of organic solvent, e.g., formamide, while high stringency hybridization can be obtained in the presence of at least about 35% formamide, and more preferably at least about 50% formamide. Stringent temperature conditions will ordinarily include temperatures of at least about 30° C., more preferably of at least about 37° C., and most preferably of at least about 42° C. Varying additional parameters, such as hybridization time, the concentration of detergent, e.g., sodium dodecyl sulfate (SDS), and the inclusion or exclusion of carrier DNA, are well known to those skilled in the art. Various levels of stringency are accomplished by combining these various conditions as needed. In a preferred: embodiment, hybridization will occur at 30° C. in 750 mM NaCl, 75 mM trisodium citrate, and 1% SDS. In a more preferred embodiment, hybridization will occur at 37° C. in 500 mM NaCl, 50 mM trisodium citrate, 1% SDS, 35% formamide, and 100 μg/ml denatured salmon sperm DNA (ssDNA). In a most preferred embodiment, hybridization will occur at 42° C. in 250 mM NaCl, 25 mM trisodium citrate, 1% SDS, 50% formamide, and 200 μg/ml ssDNA. Useful variations on these conditions will be readily apparent to those skilled in the art.

[0148] For most applications, washing steps that follow hybridization will also vary in stringency. Wash stringency conditions can be defined by salt concentration and by temperature. As above, wash stringency can be increased by decreasing salt concentration or by increasing temperature. For example, stringent salt concentration for the wash steps will preferably be less than about 30 mM NaCl and 3 mM trisodium citrate, and most preferably less than about 15 mM NaCl and 1.5 mM trisodium citrate. Stringent temperature conditions for the wash steps will ordinarily include a temperature of at least about 25° C., more preferably of at least about 42° C., and even more preferably of at least about 68° C. In an embodiment, wash steps will occur at 25° C. in 30 mM NaCl, 3 mM trisodium citrate, and 0.1% SDS. In another embodiment, wash steps will occur at 42 C in 15 mM NaCl, 1.5 mM trisodium citrate, and 0.1% SDS. In a more preferred embodiment, wash steps will occur at 68° C. in 15 mM NaCl, 1.5 mM trisodium citrate, and 0.1% SDS. Additional variations on these conditions will be readily apparent to those skilled in the art. Hybridization techniques are well known to those skilled in the art and are described, for example, in Benton and Davis (Science 196:180, 1977); Grunstein and Hogness (Proc. Natl. Acad. Sci., USA 72:3961, 1975); Ausubel et al. (Current Protocols in Molecular Biology, Wiley Interscience, New York, 2001); Berger and Kimmel (Guide to Molecular Cloning Techniques, 1987, Academic Press, New York); and Sambrook et al., Molecular Cloning: A Laboratory Manual, Cold Spring Harbor Laboratory Press, New York.

[0149] By “split” is meant divided into two or more fragments.

[0150] A “split Cas9 protein” or “split Cas9” refers to a Cas9 protein that is provided as an N-terminal fragment and a C-terminal fragment encoded by two separate nucleotide sequences. The polypeptides corresponding to the N-terminal portion and the C-terminal portion of the Cas9 protein may be spliced to form a “reconstituted” Cas9 protein. In particular embodiments, the Cas9 protein is divided into two fragments within a disordered region of the protein, e.g., as described in Nishimasu et al., Cell, Volume 156, Issue 5, pp. 935-949, 2014, or as described in Jiang et al. (2016) Science 351: 867-871. PDB file: 5F9R, each of which is incorporated herein by reference. In some embodiments, the protein is divided into two fragments at any C, T, A, or S within a region of SpCas9 between about amino acids A292-G364, F445-K483, or E565-T637, or at corresponding positions in any other Cas9, Cas9 variant (e.g., nCas9, dCas9), or other napDNAbp. In some embodiments, protein is divided into two fragments at SpCas9 T310, T313, A456, 5469, or C574. In some embodiments, the process of dividing the protein into two fragments is referred to as “splitting” the protein.

[0151] In other embodiments, the N-terminal portion of the Cas9 protein comprises amino acids 1-573 or 1-637 S. pyogenes Cas9 wild-type (SpCas9) (NCBI Reference Sequence: NC_002737.2, Uniprot Reference Sequence: Q99ZW2) and the C-terminal portion of the Cas9 protein comprises a portion of amino acids 574-1368 or 638-1368 of SpCas9 wild-type.

[0152] The C-terminal portion of the split Cas9 can be joined with the N-terminal portion of the split Cas9 to form a complete Cas9 protein. In some embodiments, the C-terminal portion of the Cas9 protein starts from where the N-terminal portion of the Cas9 protein ends. As such, in some embodiments, the C-terminal portion of the split Cas9 comprises a portion of amino acids (551-651)-1368 of spCas9. “(551-651)-1368” means starting at an amino acid between amino acids 551-651 (inclusive) and ending at amino acid 1368. For example, the C-terminal portion of the split Cas9 may comprise a portion of any one of amino acid 551-1368, 552-1368, 553-1368, 554-1368, 555-1368, 556-1368, 557-1368, 558-1368, 559-1368, 560-1368, 561-1368, 562-1368, 563-1368, 564-1368, 565-1368, 566-1368, 567-1368, 568-1368, 569-1368, 570-1368, 571-1368, 572-1368, 573-1368, 574-1368, 575-1368, 576-1368, 577-1368, 578-1368, 579-1368, 580-1368, 581-1368, 582-1368, 583-1368, 584-1368, 585-1368, 586-1368, 587-1368, 588-1368, 589-1368, 590-1368, 591-1368, 592-1368, 593-1368, 594-1368, 595-1368, 596-1368, 597-1368, 598-1368, 599-1368, 600-1368, 601-1368, 602-1368, 603-1368, 604-1368, 605-1368, 606-1368, 607-1368, 608-1368, 609-1368, 610-1368, 611-1368, 612-1368, 613-1368, 614-1368, 615-1368, 616-1368, 617-1368, 618-1368, 619-1368, 620-1368, 621-1368, 622-1368, 623-1368, 624-1368, 625-1368, 626-1368, 627-1368, 628-1368, 629-1368, 630-1368, 631-1368, 632-1368, 633-1368, 634-1368, 635-1368, 636-1368, 637-1368, 638-1368, 639-1368, 640-1368, 641-1368, 642-1368, 643-1368, 644-1368, 645-1368, 646-1368, 647-1368, 648-1368, 649-1368, 650-1368, or 651-1368 of spCas9. In some embodiments, the C-terminal portion of the split Cas9 protein comprises a portion of amino acids 574-1368 or 638-1368 of SpCas9.

[0153] By “substantially identical” is meant a polypeptide or nucleic acid molecule exhibiting at least 50% identity to a reference amino acid sequence (for example, any one of the amino acid sequences described herein) or nucleic acid sequence (for example, any one of the nucleic acid sequences described herein). In one embodiment, such a sequence is at least 60%, 80%, 85%, 90%, 95% or even 99% identical at the amino acid level or nucleic acid level to the sequence used for comparison.

[0154] Sequence identity is typically measured using sequence analysis software (for example, Sequence Analysis Software Package of the Genetics Computer Group, University of Wisconsin Biotechnology Center, 1710 University Avenue, Madison, Wis. 53705, BLAST, BESTFIT, GAP, or PILEUP/PRETTYBOX programs). Such software matches identical or similar sequences by assigning degrees of homology to various substitutions, deletions, and/or other modifications. Conservative substitutions typically include substitutions within the following groups: glycine, alanine; valine, isoleucine, leucine; aspartic acid, glutamic acid, asparagine, glutamine; serine, threonine; lysine, arginine; and phenylalanine, tyrosine. In an exemplary approach to determining the degree of identity, a BLAST program may be used, with a probability score between e⁻³ and e⁻¹⁰⁰ indicating a closely related sequence.

COBALT is used, for example, with the following parameters:
[0155] a) alignment parameters: Gap penalties-11,-1 and End-Gap penalties-5,-1,
[0156] b) CDD Parameters: Use RPS BLAST on; Blast E-value 0.003; Find Conserved columns and Recompute on, and
[0157] c) Query Clustering Parameters: Use query clusters on; Word Size 4; Max cluster distance 0.8; Alphabet Regular.
   EMBOSS Needle is used, for example, with the following parameters:
[0158] a) Matrix: BLOSUM62;
[0159] b) GAP OPEN: 10;
[0160] c) GAP EXTEND: 0.5;
[0161] d) OUTPUT FORMAT: pair;
[0162] e) END GAP PENALTY: false;
[0163] f) END GAP OPEN: 10; and
[0164] g) END GAP EXTEND: 0.5.

[0165] The term “target site” refers to a sequence within a nucleic acid molecule that is deaminated by a deaminase (e.g., cytidine or adenine deaminase) or a fusion protein comprising a deaminase (e.g., a dCas9-adenosine deaminase fusion protein or a base editor disclosed herein).

[0166] Because RNA-programmable nucleases (e.g., Cas9) use RNA:DNA hybridization to target DNA cleavage sites, these proteins are able to be targeted, in principle, to any sequence specified by the guide RNA. Methods of using RNA-programmable nucleases, such as Cas9, for site-specific cleavage (e.g., to modify a genome) are known in the art (see e.g., Cong, L. et ah, Multiplex genome engineering using CRISPR/Cas systems. Science 339, 819-823 (2013); Mali, P. et ah, RNA-guided human genome engineering via Cas9. Science 339, 823-826 (2013); Hwang, W. Y. et ah, Efficient genome editing in zebrafish using a CRISPR-Cas system. Nature biotechnology 31, 227-229 (2013); Jinek, M. et ah, RNA-programmed genome editing in human cells. eLife 2, e00471 (2013); Dicarlo, J. E. et ah, Genome engineering in Saccharomyces cerevisiae using CRISPR-Cas systems. Nucleic acids research (2013); Jiang, W. et ah RNA-guided editing of bacterial genomes using CRISPR-Cas systems. Nature biotechnology 31, 233-239 (2013); the entire contents of each of which are incorporated herein by reference).

[0167] As used herein, the terms “treat,” treating,” “treatment,” and the like refer to reducing or ameliorating a disorder and/or symptoms associated therewith or obtaining a desired pharmacologic and/or physiologic effect. It will be appreciated that, although not precluded, treating a disorder or condition does not require that the disorder, condition or symptoms associated therewith be completely eliminated. In some embodiments, the effect is therapeutic, i.e., without limitation, the effect partially or completely reduces, diminishes, abrogates, abates, alleviates, decreases the intensity of, or cures a disease and/or adverse symptom attributable to the disease. In some embodiments, the effect is preventative, i.e., the effect protects or prevents an occurrence or reoccurrence of a disease or condition. To this end, the presently disclosed methods comprise administering a therapeutically effective amount of a compositions as described herein.

[0168] By “uracil glycosylase inhibitor” or “UGI” is meant an agent that inhibits the uracil-excision repair system. In one embodiment, the agent is a protein or fragment thereof that binds a host uracil-DNA glycosylase and prevents removal of uracil residues from DNA. In an embodiment, a UGI is a protein, a fragment thereof, or a domain that is capable of inhibiting a uracil-DNA glycosylase base-excision repair enzyme. In some embodiments, a UGI domain comprises a wild-type UGI or a modified version thereof. In some embodiments, a UGI domain comprises a fragment of the exemplary amino acid sequence set forth below. In some embodiments, a UGI fragment comprises an amino acid sequence that comprises at least 60%, at least 65%, at least 70%, at least 75%, at least 80%, at least 85%, at least 90%, at least 95%, at least 96%, at least 97%, at least 98%, at least 99%, or 100% of the exemplary UGI sequence provided below. In some embodiments, a UGI comprises an amino acid sequence that is homologous to the exemplary UGI amino acid sequence or fragment thereof, as set forth below. In some embodiments, the UGI, or a portion thereof, is at least 70%, at least 75%, at least 80%, at least 85%, at least 90%, at least 95%, at least 96%, at least 97%, at least 98%, at least 99%, at least 99.5%, at least 99.9%, or 100% identical to a wild type UGI or a UGI sequence, or portion thereof, as set forth below. An exemplary UGI comprises an amino acid sequence as follows:

>splP14739IUNGI_BPPB2 Uracil-DNA glycosylase
inhibitor
MTNLSDIIEKETGKQLVIQESILMLPEEVEEVIGNKPESDILVHTAYDES
TDENVMLLTSDAPEYKPWALVIQDSNGENKIKML.

[0169] Ranges provided herein are understood to be shorthand for all of the values within the range. For example, a range of 1 to 50 is understood to include any number, combination of numbers, or sub-range from the group consisting 1, 2, 3, 4, 5, 6, 7, 8, 9, 10, 11, 12, 13, 14, 15, 16, 17, 18, 19, 20, 21, 22, 23, 24, 25, 26, 27, 28, 29, 30, 31, 32, 33, 34, 35, 36, 37, 38, 39, 40, 41, 42, 43, 44, 45, 46, 47, 48, 49, or 50.

[0170] The recitation of a listing of chemical groups in any definition of a variable herein includes definitions of that variable as any single group or combination of listed groups. The recitation of an embodiment for a variable or aspect herein includes that embodiment as any single embodiment or in combination with any other embodiments or portions thereof.

[0171] All terms are intended to be understood as they would be understood by a person skilled in the art. Unless defined otherwise, all technical and scientific terms used herein have the same meaning as commonly understood by one of ordinary skill in the art to which the disclosure pertains.

[0172] DNA editing has emerged as a viable means to modify disease states by correcting pathogenic mutations at the genetic level. Until recently, all DNA editing platforms have functioned by inducing a DNA double strand break (DSB) at a specified genomic site and relying on endogenous DNA repair pathways to determine the product outcome in a semi-stochastic manner, resulting in complex populations of genetic products. Though precise, user-defined repair outcomes can be achieved through the homology directed repair (HDR) pathway, a number of challenges have prevented high efficiency repair using HDR in therapeutically-relevant cell types. In practice, this pathway is inefficient relative to the competing, error-prone non-homologous end joining pathway. Further, HDR is tightly restricted to the G1 and S phases of the cell cycle, preventing precise repair of DSBs in post-mitotic cells. As a result, it has proven difficult or impossible to alter genomic sequences in a user-defined, programmable manner with high efficiencies in these populations.

### BRIEF DESCRIPTION OF THE DRAWINGS

[0173] FIG. 1 is a schematic diagram depicting that anti-CD117 antibody AMG 191 (Humanized SR1) can be used for conditioning in patients prior to hematopoietic stem cell transplantation.

[0174] FIG. 2 is a schematic diagram depicting that the anti-CD117 antibody SR1 (AMG191) blocks Stem Cell Factor (SCF) binding to CD117 and depletes human hematopoietic stem progenitor cells (HSPCs) and Myelodysplastic syndromes (MDS) cells in vivo.

[0175] FIG. 3 is a schematic diagram depicting a strategy for non-toxic conditioning to enable hematopoietic stem cell transplantation (HSCT) with autologous gene edited cells for patients with hematologic diseases. Stem cell factor (SCF) drives HSC self-renewal and differentiation into progenitor cells. Administering anti-CD117 antibody blocks SCF binding to CD117, thereby depleting HSCs and progenitor cells in the patient (conditioning). Autologous gene edited HSCs are transplanted into the patient. Base editing is used to generate an amino acid substitution in CD117, which prevents the binding of anti-CD117 antibodies to the edited cell, but does not interfere with normal SCF signaling. Gene-edited cells compete with residual host HSCs to repopulate bone marrow (BM). Anti-CD117 antibody blocks SCF binding to wildtype (WT) CD117, but cannot bind to HSCs with an edited CD117. Thus, native, wild-type HSCs are targeted by anti-CD117 antibody, but gene edited HSCs are not.

[0176] FIG. 4 is a schematic diagram depicting SCF binding to wild-type and gene-edited HSCs. Both cells express CD117 that are activated by SCF binding.

[0177] FIG. 5 is a schematic diagram depicting the effect of anti-CD117 antibody on wild-type and gene-edited HSCs. Binding of anti-CD117 antibody to wild-type CD117 disrupts SCF binding and results in inhibition of SCF signaling wild-type cells. In contrast, gene-edited HSCs are refractory to anti-CD117 antibody because the amino acid substitution introduced in CD117 prevents the binding of anti-CD117 antibody, but does not interfere with normal SCF binding and signaling.

[0178] FIG. 6 are tables depicting data from sequence reads of base edited cells at target sites for Makassar-WT guide (top) and Hereditary Persistence of Fetal Hemoglobin (HPFH) guide (bottom).

[0179] FIGS. 7A-7B are graphs depicting the on-target editing (FIG. 7A) and the indel rate (FIG. 7B) of five (5) guides (ABE8.8). HPFH guide was used as a control.

[0180] FIGS. 8A-8B are graphs depicting the on-target editing (FIG. 8A) and the indel rate (FIG. 8B) of eleven (11) guides (ABE8.8). HPFH guide was used as a control.

[0181] FIGS. 9A-9B are graphs depicting the on-target editing (FIG. 9A) and the indel rate (FIG. 9B) of nine (9) guides (ABE8.8). HPFH guide was used as a control.

[0182] FIG. 10 is a graph depicting the on-target editing of four (4) guides for ABE8.8 and thirteen (13) guides for IBE-NGC (Makassar).

[0183] FIGS. 11A-11T are schematic drawings depicting the location of guide targeted mutations for anti-CD117 antibody campaign.

[0184] FIGS. 12A-12N depict guides that introduce naturally occurring mutations in a CD117 target sequence. FIG. 12A is a schematic drawing depicting a CD117 target nucleotide sequence and corresponding amino acid sequence for the hybridization of guides cc-102 and cc-103. FIGS. 12B and 12C are tables depicting the editing efficiencies at different base pair positions along a CD117 target site for either guide cc-102 (FIG. 12B) or guide cc-103 (FIG. 12C). FIG. 12C is a schematic drawing depicting a CD117 target nucleotide sequence and corresponding amino acid sequence for the hybridization of guide cc-78. FIG. 12E is a table depicting the editing efficiency at different base pair positions along a CD117 target site for guide cc-78. FIG. 12F is a schematic drawing depicting a CD117 target sequence and corresponding amino acid sequence for the hybridization of guides cc-87 and cc-89. FIGS. 12G and 12H are tables depicting the editing efficiencies at different base pair positions along a CD117 target site for either guide cc-87 (FIG. 12G) or guide cc-89 (FIG. 12H). FIG. 12I is a schematic drawing depicting a CD117 target sequence and corresponding amino acid sequence for the hybridization of guide cc-110. FIG. 12J is a table depicting the editing efficiency at different base pair positions along a CD117 target site for guide cc-110. FIG. 12K is a schematic drawing depicting a CD117 target sequence and corresponding amino acid sequence for the hybridization of guide cc-146. FIG. 12L is a table depicting the editing efficiency at different base pair positions along a CD117 target site for guide cc-146. FIG. 12M is a schematic drawing depicting a CD117 target sequence and corresponding amino acid sequence for the hybridization of guide cc-182. FIG. 12N is a table depicting the editing efficiency at different base pair positions along a CD117 target site for guide cc-182.

[0185] FIGS. 13A and 13B are graphs depicting multiplex editing. FIG. 13A is a graph depicting c-KIT editing using dual guides for c-KIT and HPFH (day 3), dual guides for c-KIT and HPFH (day 5), or just the c-KIT guide and no HPFH guide. FIG. 13B is a graph depicting HPFH editing using dual guides for c-KIT and HPFH at either 72 or 120 hours. HPFH only was used as a control.

### DETAILED DESCRIPTION OF THE INVENTION

[0186] The invention provides a base editing strategy targeting cell surface proteins (e.g., one or more of CD117, CXCR4, CD135, CD90, CD45, CD34) that is useful for non-toxic conditioning.

[0187] The invention is based, at least in part, on the discovery that base editing can be used to generate a single base substitution in the CD117 gene resulting in an amino acid substitution, that alters an epitope binding domain in the encoded protein, thereby preventing anti-CD117 antibodies, antibody drug conjugates (ADCs), or chimeric antigen receptor (CAR)-T cells from binding to CD117 on edited cells. Advantageously, this alteration in CD117 does not alter Stem Cell Factor (SCF) binding or CD117 biological activity. Thus, the invention provides for the post-HSCT use of anti-CD117 therapies, as well as therapies targeting other antigens expressed on the surface of hematopoietic stem cells. which do not bind to or deplete CD117-edited cells. Accordingly, gene edited cells may be expanded in vivo. Advantageously, this allows for cancer treatment without hematopoietic toxicity.

[0188] Prior art conditioning methods were limited to administering a conditioning regimen prior to HSC transplantation (i.e., cannot re-dose patient to expand edited cells in vivo or continue to treat malignant disease). To avoid affecting donor/edited cells, the half-life of the antibody needed to be short, such that it had been cleared from the body prior to transplantation. This ensured that the antibody did not target transplanted cells. There is currently no method/therapy that allows the selective targeting of patient HSCs. This applies to all current conditioning protocols (e.g., Abs, ADCs, CAR-T cell). Thus, clinical trial design is extremely challenging for conditioning prior to HSCT and consideration must be given to number/concentration of doses vs HSC depletion vs hematopoietic failure. However, research suggests that efficient antibody-based conditioning may only be achieved through multiple doses in immunocompetent patients (unlike SCID trials).

[0189] Thus, the present methods for conditioning were developed to overcome the limitations of previous methods. There are several advantages of the conditioning methods of the invention. The methods described herein provide for the selective targeting of endogenous HSCs, while sparing edited HSCs. Accordingly, antibody or ADC treatment can continue to be administered following HSCT to expand gene edited cells in vivo or treat malignant disease with repeated dosing. This minimizes the risk of killing edited cells. Edited cells would allow for the administration of antibody or ADC without Fc modifications to reduce their half-life. This has the potential to enable the use of antibodies with longer half-lives, such as AMG191, and simplify the development of ADCs. Clinical trial design is also simplified—HSCs could be infused prior to or concurrently with conditioning with little or no risk of being depleted (e.g., in MDS or AML patients). The methods provide a benefit for all patients regardless of immune status.

[0190] In one embodiment, CD117 is altered (e.g., using base editing) in a cell for transplantation to prevent binding of anti-CD117 antibody, but not interfere with normal SCF signaling. Using base editing, a nucleobase change may be generated to create an amino acid substitution in CD117. Stem cell factor (SCF) drives HSC self-renewal and differentiation into progenitor cells. Administering anti-CD117 antibody blocks SCF binding to CD117, thereby depleting HSCs and progenitor cells in the patient (conditioning). Autologous gene edited HSCs are transplanted into the patient. Gene-edited cells compete with residual host HSCs to repopulate bone marrow (BM). Anti-CD117 antibody blocks SCF binding to wildtype (WT) CD117, but cannot bind to HSCs with an edited CD117. Thus, native, wild-type HSCs are targeted by anti-CD117 antibody, but gene edited HSCs are not. Thus, both cells express CD117 polypeptides that are activated by SCF binding. However, binding of anti-CD117 antibody to wild-type CD117 disrupts SCF binding and results in inhibition of SCF signaling wild-type cells. In contrast, gene-edited HSCs are refractory to anti-CD117 antibody because the amino acid substitution introduced in CD117 prevents the binding of anti-CD117 antibody, but does not interfere with normal SCF binding and signaling.

[0191] In various embodiments, the antibodies of the invention are currently used in the clinic (e.g. if the epitope edited is required for the binding of AMG 191). In one embodiment, CD117 is altered to resemble murine CD117, which does not cross react with AMG 191 or SR1. Because murine SCF activates murine and human cells, species-to-species variation in the epitope provides potential variants that have SCF activity while having reduced or no anti-CD117 binding. For the development of new antibodies, ADCs, CAR-T cells etc. that could target a novel epitope in one of the extracellular domains of CD117 (D1-D5). Thus, methods of identifying a candidate agent for selectively depleting or ablating an endogenous stem cell population are also within the scope of the invention. Such methods may comprise the steps of: (a) contacting a sample comprising the stem cell population with a test agent (e.g., antibody); and (b) detecting whether one or more cells of the stem cell population are depleted or ablated from the sample; wherein the depletion or ablation of one or more cells of the stem cell population following the contacting step identifies the test agent as a candidate agent. In a further step an edited cell is identified as not similarly depleted or ablated by the agent. In some embodiments, the cell is contacted with the test agent for at least about 2-24 hours.

[0192] Exemplary, yet nonlimiting, examples of compositions and methods for treating hemoglobinopathies are described in International Publication No. WO2020168133, which is incorporated herein by reference for its entirety.

### Methods of Treatment

[0193] The methods and compositions disclosed herein may be used to condition a subject's tissues (e.g., bone marrow) for engraftment or transplant and following such conditioning, a stem cell population is administered to the subject. The transplanted cells (e.g., HSCs) can be autologous cells or allogeneic cells. In certain aspects, the stem cell population comprises an exogenous stem cell population. In some embodiments, the stem cell population comprises the subject's endogenous stem cells (e.g., endogenous stem cells that have been genetically modified to correct a disease or genetic defect). Preferably, such methods and compositions are useful for treating such diseases without causing the toxicities that are observed in response to traditional conditioning therapies, such as irradiation.

[0194] Hematopoietic stem cell transplant therapy can be administered to a subject in need of treatment so as to populate or re-populate one or more blood cell types. Hematopoietic stem cells generally exhibit multi-potency, and can thus differentiate into multiple different blood lineages including, but not limited to, granulocytes (e.g., promyelocytes, neutrophils, eosinophils, basophils), erythrocytes (e.g., reticulocytes, erythrocytes), thrombocytes (e.g., megakaryoblasts, platelet producing megakaryocytes, platelets), monocytes (e.g., monocytes, macrophages), dendritic cells, microglia, osteoclasts, and lymphocytes (e.g., NK cells, B-cells and T-cells). Hematopoietic stem cells are additionally capable of self-renewal, and can thus give rise to daughter cells that have equivalent potential as the mother cell, and also feature the capacity to be reintroduced into a transplant recipient whereupon they home to the hematopoietic stem cell niche and re-establish productive and sustained hematopoiesis.

[0195] Hematopoietic stem cells can thus be administered to a patient defective or deficient in one or more cell types of the hematopoietic lineage in order to reconstitute the defective or deficient population of cells in vivo, thereby treating the pathology associated with the defect or depletion in the endogenous blood cell population. The compositions and methods described herein can thus be used to treat a non-malignant hemoglobinopathy (e.g., a hemoglobinopathy selected from the group consisting of sickle cell anemia, thalassemia, Fanconi anemia, aplastic anemia, and Wiskott-Aldrich syndrome). Additionally or alternatively, the compositions and methods described herein can be used to treat a malignancy or proliferative disorder, such as a hematologic cancer, myeloproliferative disease. In the case of cancer treatment, the compositions and methods described herein may be administered to a patient so as to deplete a population of endogenous hematopoietic stem cells prior to hematopoietic stem cell transplantation therapy, in which case the transplanted cells can home to a niche created by the endogenous cell depletion step and establish productive hematopoiesis. This, in turn, can re-constitute a population of cells depleted during cancer cell eradication, such as during systemic chemotherapy. Exemplary hematological cancers that can be treated using the compositions and methods described herein include, without limitation, acute myeloid leukemia, acute lymphoid leukemia, chronic myeloid leukemia, chronic lymphoid leukemia, multiple myeloma, diffuse large B-cell lymphoma, and non-Hodgkin's lymphoma, as well as other cancerous conditions, including neuroblastoma.

[0196] Antibodies, antigen-binding fragments thereof, and ligands described herein can be administered to a patient (e.g., a human patient suffering from cancer, an autoimmune disease, or in need of hematopoietic stem cell transplant therapy) in a variety of dosage forms. For instance, antibodies, antigen-binding fragments thereof, and ligands described herein can be administered to a patient suffering from cancer, an autoimmune disease, or in need of hematopoietic stem cell transplant therapy in the form of an aqueous solution, such as an aqueous solution containing one or more pharmaceutically acceptable excipients. Pharmaceutically acceptable excipients for use with the compositions and methods described herein include viscosity-modifying agents. The aqueous solution may be sterilized using techniques known in the art.

[0197] The antibodies, antigen-binding fragments, and ligands described herein may be administered by a variety of routes, such as orally, transdermally, subcutaneously, intranasally, intravenously, intramuscularly, intraocularly, or parenterally. The most suitable route for administration in any given case will depend on the particular antibody, antigen-binding fragment, or ligand administered, the patient, pharmaceutical formulation methods, administration methods (e.g., administration time and administration route), the patient's age, body weight, sex, severity of the diseases being treated, the patient's diet, and the patient's excretion rate.

### Nucleobase Editor

[0198] Disclosed herein is a base editor or a nucleobase editor for editing, modifying or altering a target nucleotide sequence of a polynucleotide. Described herein is a nucleobase editor or a base editor comprising a polynucleotide programmable nucleotide binding domain and a nucleobase editing domain (e.g., adenosine deaminase, cytidine deaminase). A polynucleotide programmable nucleotide binding domain, when in conjunction with a bound guide polynucleotide (e.g., gRNA), can specifically bind to a target polynucleotide sequence (i.e., via complementary base pairing between bases of the bound guide nucleic acid and bases of the target polynucleotide sequence) and thereby localize the base editor to the target nucleic acid sequence desired to be edited. In some embodiments, the target polynucleotide sequence comprises single-stranded DNA or double-stranded DNA. In some embodiments, the target polynucleotide sequence comprises RNA. In some embodiments, the target polynucleotide sequence comprises a DNA-RNA hybrid.

### Polynucleotide Programmable Nucleotide Binding Domain

[0199] It should be appreciated that polynucleotide programmable nucleotide binding domains can also include nucleic acid programmable proteins that bind RNA. For example, the polynucleotide programmable nucleotide binding domain can be associated with a nucleic acid that guides the polynucleotide programmable nucleotide binding domain to an RNA. Other nucleic acid programmable DNA binding proteins are also within the scope of this disclosure, though they are not specifically listed in this disclosure.

[0200] A polynucleotide programmable nucleotide binding domain of a base editor can itself comprise one or more domains. For example, a polynucleotide programmable nucleotide binding domain can comprise one or more nuclease domains. In some embodiments, the nuclease domain of a polynucleotide programmable nucleotide binding domain can comprise an endonuclease or an exonuclease. Herein the term “exonuclease” refers to a protein or polypeptide capable of digesting a nucleic acid (e.g., RNA or DNA) from free ends, and the term “endonuclease” refers to a protein or polypeptide capable of catalyzing (e.g., cleaving) internal regions in a nucleic acid (e.g., DNA or RNA). In some embodiments, an endonuclease can cleave a single strand of a double-stranded nucleic acid. In some embodiments, an endonuclease can cleave both strands of a double-stranded nucleic acid molecule. In some embodiments a polynucleotide programmable nucleotide binding domain can be a deoxyribonuclease. In some embodiments a polynucleotide programmable nucleotide binding domain can be a ribonuclease.

[0201] In some embodiments, a nuclease domain of a polynucleotide programmable nucleotide binding domain can cut zero, one, or two strands of a target polynucleotide. In some cases, the polynucleotide programmable nucleotide binding domain can comprise a nickase domain. Herein the term “nickase” refers to a polynucleotide programmable nucleotide binding domain comprising a nuclease domain that is capable of cleaving only one strand of the two strands in a duplexed nucleic acid molecule (e.g., DNA). In some embodiments, a nickase can be derived from a fully catalytically active (e.g., natural) form of a polynucleotide programmable nucleotide binding domain by introducing one or more mutations into the active polynucleotide programmable nucleotide binding domain. For example, where a polynucleotide programmable nucleotide binding domain comprises a nickase domain derived from Cas9, the Cas9-derived nickase domain can include a D10A mutation and a histidine at position 840. In such cases, the residue H840 retains catalytic activity and can thereby cleave a single strand of the nucleic acid duplex. In another example, a Cas9-derived nickase domain can comprise an H840A mutation, while the amino acid residue at position 10 remains a D. In some embodiments, a nickase can be derived from a fully catalytically active (e.g., natural) form of a polynucleotide programmable nucleotide binding domain by removing all or a portion of a nuclease domain that is not required for the nickase activity. For example, where a polynucleotide programmable nucleotide binding domain comprises a nickase domain derived from Cas9, the Cas9-derived nickase domain can comprise a deletion of all or a portion of the RuvC domain or the HNH domain.

[0202] The amino acid sequence of an exemplary catalytically active Cas9 is as follows:

MDKKYSIGLDIGTNSVGWAVITDEYKVPSKKFKVLGNTDRHSIKKNLIGALLFDSGETAEAT
RLKRTARRRYTRRKNRICYLQEIFSNEMAKVDDSFFHRLEESFLVEEDKKHERHPIFGNIVD
EVAYHEKYPTIYHLRKKLVDSTDKADLRLIYLALAHMIKFRGHFLIEGDLNPDNSDVDKLFI
QLVQTYNQLFEENPINASGVDAKAILSARLSKSRRLENLIAQLPGEKKNGLFGNLIALSLGL
TPNFKSNFDLAEDAKLQLSKDTYDDDLDNLLAQIGDQYADLFLAAKNLSDAILLSDILRVNT
EITKAPLSASMIKRYDEHHQDLTLLKALVRQQLPEKYKEIFFDQSKNGYAGYIDGGASQEEF
YKFIKPILEKMDGTEELLVKLNREDLLRKQRTFDNGSIPHQIHLGELHAILRRQEDFYPFLK
DNREKIEKILTFRIPYYVGPLARGNSRFAWMTRKSEETITPWNFEEVVDKGASAQSFIERMT
NFDKNLPNEKVLPKHSLLYEYFTVYNELTKVKYVTEGMRKPAFLSGEQKKAIVDLLFKTNRK
VTVKQLKEDYFKKIECFDSVEISGVEDRFNASLGTYHDLLKIIKDKDFLDNEENEDILEDIV
LTLTLFEDREMIEERLKTYAHLFDDKVMKQLKRRRYTGWGRLSRKLINGIRDKQSGKTILDF
LKSDGFANRNFMQLIHDDSLTFKEDIQKAQVSGQGDSLHEHIANLAGSPAIKKGILQTVKVV
DELVKVMGRHKPENIVIEMARENQTTQKGQKNSRERMKRIEEGIKELGSQILKEHPVENTQL
QNEKLYLYYLQNGRDMYVDQELDINRLSDYDVDHIVPQSFLKDDSIDNKVLTRSDKNRGKSD
NVPSEEVVKKMKNYWRQLLNAKLITQRKFDNLTKAERGGLSELDKAGFIKRQLVETRQITKH
VAQILDSRMNTKYDENDKLIREVKVITLKSKLVSDFRKDFQFYKVREINNYHHAHDAYLNAV
VGTALIKKYPKLESEFVYGDYKVYDVRKMIAKSEQEIGKATAKYFFYSNIMNFFKTEITLAN
GEIRKRPLIETNGETGEIVWDKGRDFATVRKVLSMPQVNIVKKTEVQTGGFSKESILPKRNS
DKLIARKKDWDPKKYGGFDSPTVAYSVLVVAKVEKGKSKKLKSVKELLGITIMERSSFEKNP
IDFLEAKGYKEVKKDLIIKLPKYSLFELENGRKRMLASAGELQKGNELALPSKYVNFLYLAS
HYEKLKGSPEDNEQKQLFVEQHKHYLDEIIEQISEFSKRVILADANLDKVLSAYNKHRDKPI
REQAENIIHLFTLTNLGAPAAFKYFDTTIDRKRYTSTKEVLDATLIHQSITGLYETRIDLSQ
LGGD.

[0203] A base editor comprising a polynucleotide programmable nucleotide binding domain comprising a nickase domain is thus able to generate a single-strand DNA break (nick) at a specific polynucleotide target sequence (e.g., determined by the complementary sequence of a bound guide nucleic acid). In some embodiments, the strand of a nucleic acid duplex target polynucleotide sequence that is cleaved by a base editor comprising a nickase domain (e.g., Cas9-derived nickase domain) is the strand that is not edited by the base editor (i.e., the strand that is cleaved by the base editor is opposite to a strand comprising a base to be edited). In other embodiments, a base editor comprising a nickase domain (e.g., Cas9-derived nickase domain) can cleave the strand of a DNA molecule which is being targeted for editing. In such cases, the non-targeted strand is not cleaved.

[0204] Also provided herein are base editors comprising a polynucleotide programmable nucleotide binding domain which is catalytically dead (i.e., incapable of cleaving a target polynucleotide sequence). Herein the terms “catalytically dead” and “nuclease dead” are used interchangeably to refer to a polynucleotide programmable nucleotide binding domain which has one or more mutations and/or deletions resulting in its inability to cleave a strand of a nucleic acid. In some embodiments, a catalytically dead polynucleotide programmable nucleotide binding domain base editor can lack nuclease activity as a result of specific point mutations in one or more nuclease domains. For example, in the case of a base editor comprising a Cas9 domain, the Cas9 can comprise both a D10A mutation and an H840A mutation. Such mutations inactivate both nuclease domains, thereby resulting in the loss of nuclease activity. In other embodiments, a catalytically dead polynucleotide programmable nucleotide binding domain can comprise one or more deletions of all or a portion of a catalytic domain (e.g., RuvC1 and/or HNH domains). In further embodiments, a catalytically dead polynucleotide programmable nucleotide binding domain comprises a point mutation (e.g., D10A or H840A) as well as a deletion of all or a portion of a nuclease domain.

[0205] Also contemplated herein are mutations capable of generating a catalytically dead polynucleotide programmable nucleotide binding domain from a previously functional version of the polynucleotide programmable nucleotide binding domain. For example, in the case of catalytically dead Cas9 (“dCas9”), variants having mutations other than D10A and H840A are provided, which result in nuclease inactivated Cas9. Such mutations, by way of example, include other amino acid substitutions at D10 and H840, or other substitutions within the nuclease domains of Cas9 (e.g., substitutions in the HNH nuclease subdomain and/or the RuvC1 subdomain). Additional suitable nuclease-inactive dCas9 domains can be apparent to those of skill in the art based on this disclosure and knowledge in the field, and are within the scope of this disclosure. Such additional exemplary suitable nuclease-inactive Cas9 domains include, but are not limited to, D10A/H840A, D10A/D839A/H840A, and D10A/D839A/H840A/N863A mutant domains (See, e.g., Prashant et al., CAS9 transcriptional activators for target specificity screening and paired nickases for cooperative genome engineering. Nature Biotechnology. 2013; 31(9): 833-838, the entire contents of which are incorporated herein by reference).

[0206] Non-limiting examples of a polynucleotide programmable nucleotide binding domain which can be incorporated into a base editor include a CRISPR protein-derived domain, a restriction nuclease, a meganuclease, TAL nuclease (TALEN), and a zinc finger nuclease (ZFN). In some cases, a base editor comprises a polynucleotide programmable nucleotide binding domain comprising a natural or modified protein or portion thereof which via a bound guide nucleic acid is capable of binding to a nucleic acid sequence during CRISPR (i.e., Clustered Regularly Interspaced Short Palindromic Repeats)-mediated modification of a nucleic acid. Such a protein is referred to herein as a “CRISPR protein”. Accordingly, disclosed herein is a base editor comprising a polynucleotide programmable nucleotide binding domain comprising all or a portion of a CRISPR protein (i.e. a base editor comprising as a domain all or a portion of a CRISPR protein, also referred to as a “CRISPR protein-derived domain” of the base editor). A CRISPR protein-derived domain incorporated into a base editor can be modified compared to a wild-type or natural version of the CRISPR protein. For example, as described below a CRISPR protein-derived domain can comprise one or more mutations, insertions, deletions, rearrangements and/or recombinations relative to a wild-type or natural version of the CRISPR protein.

[0207] CRISPR is an adaptive immune system that provides protection against mobile genetic elements (viruses, transposable elements and conjugative plasmids). CRISPR clusters contain spacers, sequences complementary to antecedent mobile elements, and target invading nucleic acids. CRISPR clusters are transcribed and processed into CRISPR RNA (crRNA). In type II CRISPR systems, correct processing of pre-crRNA requires a trans-encoded small RNA (tracrRNA), endogenous ribonuclease 3 (rnc) and a Cas9 protein. The tracrRNA serves as a guide for ribonuclease 3-aided processing of pre-crRNA. Subsequently, Cas9/crRNA/tracrRNA endonucleolytically cleaves linear or circular dsDNA target complementary to the spacer. The target strand not complementary to crRNA is first cut endonucleolytically, and then trimmed 3′-5′ exonucleolytically. In nature, DNA-binding and cleavage typically requires protein and both RNAs. However, single guide RNAs (“sgRNA”, or simply “gNRA”) can be engineered so as to incorporate aspects of both the crRNA and tracrRNA into a single RNA species. See, e.g., Jinek M., Chylinski K., Fonfara I., Hauer M., Doudna J. A., Charpentier E. Science 337:816-821(2012), the entire contents of which is hereby incorporated by reference. Cas9 recognizes a short motif in the CRISPR repeat sequences (the PAM or protospacer adjacent motif) to help distinguish self versus non-self.

[0208] In some embodiments, the methods described herein can utilize an engineered Cas protein. A guide RNA (gRNA) is a short synthetic RNA composed of a scaffold sequence necessary for Cas-binding and a user-defined ˜20 nucleotide spacer that defines the genomic (or polynucleotide, e.g., DNA or RNA) target to be modified. Thus, a skilled artisan can change the genomic or polynucleotide target of the Cas protein by changing the target sequence present in the gRNA. The specificity of the Cas protein is partially determined by how specific the gRNA targeting sequence is for the genomic polynucleotide target sequence compared to the rest of the genome.

[0209] In some embodiments, the gRNA scaffold sequence is as follows: GUUUUAGAGC UAGAAAUAGC AAGUUAAAAU AAGGCUAGUC CGUUAUCAAC UUGAAAAAGU GGCACCGAGU CGGUGCUUUU.

[0210] In an embodiment, the RNA scaffold comprises a stem loop. In an embodiment, the RNA scaffold comprises the nucleic acid sequence:

GUUUUUGUACUCUCAAGAUUUAAGUAACUGUACAACGAAACUUACACAGU
UACUUAAAUCUUGCAGAAGCUACAAAGAUAAGGCUUCAUGCCGAAAUCAA
CACCCUGUCAUUUUAUGGCAGGGUG

In an embodiment, the RNA scaffold comprises the nucleic acid sequence:

GUUUUAGAGCUAGAAAUAGCAAGUUAAAAUAAGGCUAGUCCGUUAUCAAC
UUGAAAAAGUGGCACCGAGUCGGUGCUUUU.

[0211] In an embodiment, an S. pyogenes sgRNA scaffold polynucleotide sequence is as follows:

GUUUUAGAGCUAGAAAUAGCAAGUUAAAAUAAGGCUAGUCCGUUAUCAAC
UUGAAAAAGUGGCACCGAGUCGGUGC.

[0212] In an embodiment, an S. aureus sgRNA scaffold polynucleotide sequence is as follows:

GUUUUAGUACUCUGUAAUGAAAAUUACAGAAUCUACUAAAACAAGGCAAA
AUGCCGUGUUUAUCUCGUCAACUUGUUGGCGAGA.

[0213] In an embodiment, a BhCas12b sgRNA scaffold has the following polynucleotide sequence:

GUUCUGTCUUUUGGUCAGGACAACCGUCUAGCUAUAAGUGCUGCAGGGUG
UGAGAAACUCCUAUUGCUGGACGAUGUCUCUUACGAGGCAUUAGCAC.

[0214] In an embodiment, a BvCas12b sgRNA scaffold has the following polynucleotide sequence:

GACCUAUAGGGUCAAUGAAUCUGUGCGUGUGCCAUAAGUAAUUAAAAAUU
ACCCACCACAGGAGCACCUGAAAACAGGUGCUUGGCAC.

[0215] In some embodiments, a CRISPR protein-derived domain incorporated into a base editor is an endonuclease (e.g., deoxyribonuclease or ribonuclease) capable of binding a target polynucleotide when in conjunction with a bound guide nucleic acid. In some embodiments, a CRISPR protein-derived domain incorporated into a base editor is a nickase capable of binding a target polynucleotide when in conjunction with a bound guide nucleic acid. In some embodiments, a CRISPR protein-derived domain incorporated into a base editor is a catalytically dead domain capable of binding a target polynucleotide when in conjunction with a bound guide nucleic acid. In some embodiments, a target polynucleotide bound by a CRISPR protein derived domain of a base editor is DNA. In some embodiments, a target polynucleotide bound by a CRISPR protein-derived domain of a base editor is RNA. Cas proteins that can be used herein include class 1 and class 2. Non-limiting examples of Cas proteins include Cas1, Cas1B, Cas2, Cas3, Cas4, Cas5, Cas5d, Cas5t, Cas5h, Cas5a, Cas6, Cas7, Cas8, Cas9 (also known as Csn1 or Csx12), Cas10, Csy1, Csy2, Csy3, Csy4, Cse1, Cse2, Cse3, Cse4, Cse5e, Csc1, Csc2, Csa5, Csn1, Csn2, Csm1, Csm2, Csm3, Csm4, Csm5, Csm6, Cmr1, Cmr3, Cmr4, Cmr5, Cmr6, Csb1, Csb2, Csb3, Csx17, Csx14, Csx10, Csx16, CsaX, Csx3, Csx1, Csx1S, Csf1, Csf2, CsO, Csf4, Csd1, Csd2, Cst1, Cst2, Csh1, Csh2, Csa1, Csa2, Csa3, Csa4, Csa5, Cas12a/Cpf1, Cas12b/C2c1, Cas12c/C2c3, Cas12d/CasY, Cas12e/CasX, Cas12g, Cas12h, Cas12i, and Cas12j/CasΦ, CARF, DinG, homologues thereof, or modified versions thereof. An unmodified CRISPR enzyme can have DNA cleavage activity, such as Cas9, which has two functional endonuclease domains: RuvC and HNH. A CRISPR enzyme can direct cleavage of one or both strands at a target sequence, such as within a target sequence and/or within a complement of a target sequence. For example, a CRISPR enzyme can direct cleavage of one or both strands within about 1, 2, 3, 4, 5, 6, 7, 8, 9, 10, 15, 20, 25, 50, 100, 200, 500, or more base pairs from the first or last nucleotide of a target sequence.

[0216] A vector that encodes a CRISPR enzyme that is mutated to with respect, to a corresponding wild-type enzyme such that the mutated CRISPR enzyme lacks the ability to cleave one or both strands of a target polynucleotide containing a target sequence can be used. Cas9 can refer to a polypeptide with at least or at least about 50%, 60%, 70%, 80%, 90%, 91%, 92%, 93%, 94%, 95%, 96%, 97%, 98%, 99%, or 100% sequence identity and/or sequence homology to a wild type exemplary Cas9 polypeptide (e.g., Cas9 from S. pyogenes). Cas9 can refer to a polypeptide with at most or at most about 50%, 60%, 70%, 80%, 90%, 91%, 92%, 93%, 94%, 95%, 96%, 97%, 98%, 99%, or 100% sequence identity and/or sequence homology to a wild type exemplary Cas9 polypeptide (e.g., from S. pyogenes). Cas9 can refer to the wild type or a modified form of the Cas9 protein that can comprise an amino acid change such as a deletion, insertion, substitution, variant, mutation, fusion, chimera, or any combination thereof.

[0217] In some embodiments, a CRISPR protein-derived domain of a base editor can include all or a portion of Cas9 from Corynebacterium ulcerans (NCBI Refs: NC_015683.1, NC_017317.1); Corynebacterium diphtheria (NCBI Refs: NC_016782.1, NC_016786.1); Spiroplasma syrphidicola (NCBI Ref: NC_021284.1); Prevotella intermedia (NCBI Ref: NC_017861.1); Spiroplasma taiwanense (NCBI Ref: NC_021846.1); Streptococcus iniae (NCBI Ref: NC_021314.1); Belliella baltica (NCBI Ref: NC_018010.1); Psychroflexus torquis (NCBI Ref: NC_018721.1); Streptococcus thermophilus (NCBI Ref: YP_820832.1); Listeria innocua (NCBI Ref: NP_472073.1); Campylobacter jejuni (NCBI Ref: YP_002344900.1); Neisseria meningitidis (NCBI Ref: YP_002342100.1), Streptococcus pyogenes, or Staphylococcus aureus.

Cas9 domains of Nucleobase Editors

[0218] Cas9 nuclease sequences and structures are well known to those of skill in the art (See, e.g., “Complete genome sequence of an Ml strain of Streptococcus pyogenes.” Ferretti et al., J. J., McShan W. M., Ajdic D. J., Savic D. J., Savic G., Lyon K., Primeaux C, Sezate S., Suvorov A. N., Kenton S., Lai H. S., Lin S. P., Qian Y., Jia H. G., Najar F. Z., Ren Q., Zhu H., Song L., White J., Yuan X., Clifton S. W., Roe B. A., McLaughlin R. E., Proc. Natl. Acad. Sci. U.S.A. 98:4658-4663(2001); “CRISPR RNA maturation by trans-encoded small RNA and host factor RNase III.” Deltcheva E., Chylinski K., Sharma C. M., Gonzales K., Chao Y., Pirzada Z. A., Eckert M. R., Vogel J., Charpentier E., Nature 471:602-607(2011); and “A programmable dual-RNA-guided DNA endonuclease in adaptive bacterial immunity.” Jinek M., Chylinski K., Fonfara I., Hauer M., Doudna J. A., Charpentier E. Science 337:816-821(2012), the entire contents of each of which are incorporated herein by reference). Cas9 orthologs have been described in various species, including, but not limited to, S. pyogenes and S. thermophilus. Additional suitable Cas9 nucleases and sequences will be apparent to those of skill in the art based on this disclosure, and such Cas9 nucleases and sequences include Cas9 sequences from the organisms and loci disclosed in Chylinski, Rhun, and Charpentier, “The tracrRNA and Cas9 families of type II CRISPR-Cas immunity systems” (2013) RNA Biology 10:5, 726-737; the entire contents of which are incorporated herein by reference.

[0219] In some aspects, a nucleic acid programmable DNA binding protein (napDNAbp) is a Cas9 domain. Non-limiting, exemplary Cas9 domains are provided herein. The Cas9 domain may be a nuclease active Cas9 domain, a nuclease inactive Cas9 domain, or a Cas9 nickase. In some embodiments, the Cas9 domain is a nuclease active domain. For example, the Cas9 domain may be a Cas9 domain that cuts both strands of a duplexed nucleic acid (e.g., both strands of a duplexed DNA molecule). In some embodiments, the Cas9 domain comprises any one of the amino acid sequences as set forth herein. In some embodiments the Cas9 domain comprises an amino acid sequence that is at least 60%, at least 65%, at least 70%, at least 75%, at least 80%, at least 85%, at least 90%, at least 95%, at least 96%, at least 97%, at least 98%, at least 99%, or at least 99.5% identical to any one of the amino acid sequences set forth herein. In some embodiments, the Cas9 domain comprises an amino acid sequence that has 1, 2, 3, 4, 5, 6, 7, 8, 9, 10, 11, 12, 13, 14, 15, 16, 17, 18, 19, 20, 21, 22, 21, 24, 25, 26, 27, 28, 29, 30, 31, 32, 33, 34, 35, 36, 37, 38, 39, 40, 41, 42, 43, 44, 45, 46, 47, 48, 49, 50 or more mutations compared to any one of the amino acid sequences set forth herein. In some embodiments, the Cas9 domain comprises an amino acid sequence that has at least 10, at least 15, at least 20, at least 30, at least 40, at least 50, at least 60, at least 70, at least 80, at least 90, at least 100, at least 150, at least 200, at least 250, at least 300, at least 350, at least 400, at least 500, at least 600, at least 700, at least 800, at least 900, at least 1000, at least 1100, or at least 1200 identical contiguous amino acid residues as compared to any one of the amino acid sequences set forth herein.

[0220] In some embodiments, proteins comprising fragments of Cas9 are provided. For example, in some embodiments, a protein comprises one of two Cas9 domains: (1) the gRNA binding domain of Cas9; or (2) the DNA cleavage domain of Cas9. In some embodiments, proteins comprising Cas9 or fragments thereof are referred to as “Cas9 variants.” A Cas9 variant shares homology to Cas9, or a fragment thereof. For example, a Cas9 variant is at least about 70% identical, at least about 80% identical, at least about 90% identical, at least about 95% identical, at least about 96% identical, at least about 97% identical, at least about 98% identical, at least about 99% identical, at least about 99.5% identical, or at least about 99.9% identical to wild type Cas9. In some embodiments, the Cas9 variant may have 1, 2, 3, 4, 5, 6, 7, 8, 9, 10, 11, 12, 13, 14, 15, 16, 17, 18, 19, 20, 21, 22, 21, 24, 25, 26, 27, 28, 29, 30, 31, 32, 33, 34, 35, 36, 37, 38, 39, 40, 41, 42, 43, 44, 45, 46, 47, 48, 49, 50 or more amino acid changes compared to wild type Cas9. In some embodiments, the Cas9 variant comprises a fragment of Cas9 (e.g., a gRNA binding domain or a DNA-cleavage domain), such that the fragment is at least about 70% identical, at least about 80% identical, at least about 90% identical, at least about 95% identical, at least about 96% identical, at least about 97% identical, at least about 98% identical, at least about 99% identical, at least about 99.5% identical, or at least about 99.9% identical to the corresponding fragment of wild type Cas9. In some embodiments, the fragment is at least 30%, at least 35%, at least 40%, at least 45%, at least 50%, at least 55%, at least 60%, at least 65%, at least 70%, at least 75%, at least 80%, at least 85%, at least 90%, at least 95% identical, at least 96%, at least 97%, at least 98%, at least 99%, or at least 99.5% of the amino acid length of a corresponding wild type Cas9. In some embodiments, the fragment is at least 100 amino acids in length. In some embodiments, the fragment is at least 100, 150, 200, 250, 300, 350, 400, 450, 500, 550, 600, 650, 700, 750, 800, 850, 900, 950, 1000, 1050, 1100, 1150, 1200, 1250, or at least 1300 amino acids in length.

[0221] In some embodiments, Cas9 fusion proteins as provided herein comprise the full-length amino acid sequence of a Cas9 protein, e.g., one of the Cas9 sequences provided herein. In other embodiments, however, fusion proteins as provided herein do not comprise a full-length Cas9 sequence, but only one or more fragments thereof. Exemplary amino acid sequences of suitable Cas9 domains and Cas9 fragments are provided herein, and additional suitable sequences of Cas9 domains and fragments will be apparent to those of skill in the art.

[0222] A Cas9 protein can associate with a guide RNA that guides the Cas9 protein to a specific DNA sequence that has complementary to the guide RNA. In some embodiments, the polynucleotide programmable nucleotide binding domain is a Cas9 domain, for example a nuclease active Cas9, a Cas9 nickase (nCas9), or a nuclease inactive Cas9 (dCas9). Examples of nucleic acid programmable DNA binding proteins include, without limitation, Cas9 (e.g., dCas9 and nCas9), CasX, CasY, Cpf1, Cas12b/C2C1, Cas12c/C2C3, and Cas12j/CasΦ.

[0223] In some embodiments, wild type Cas9 corresponds to Cas9 from Streptococcus pyogenes (NCBI Reference Sequence: NC_017053.1, nucleotide and amino acid sequences as follows).

ATGGATAAGAAATACTCAATAGGCTTAGATATCGGCACAAATAGCGTCG
GATGGGCGGTGATCACTGATGATTATAAGGTTCCGTCTAAAAAGTTCAA
GGTTCTGGGAAATACAGACCGCCACAGTATCAAAAAAAATCTTATAGGG
GCTCTTTTATTTGGCAGTGGAGAGACAGCGGAAGCGACTCGTCTCAAAC
GGACAGCTCGTAGAAGGTATACACGTCGGAAGAATCGTATTTGTTATCT
ACAGGAGATTTTTTCAAATGAGATGGCGAAAGTAGATGATAGTTTCTTT
CATCGACTTGAAGAGTCTTTTTTGGTGGAAGAAGACAAGAAGCATGAAC
GTCATCCTATTTTTGGAAATATAGTAGATGAAGTTGCTTATCATGAGAA
ATATCCAACTATCTATCATCTGCGAAAAAAATTGGCAGATTCTACTGAT
AAAGCGGATTTGCGCTTAATCTATTTGGCCTTAGCGCATATGATTAAGT
TTCGTGGTCATTTTTTGATTGAGGGAGATTTAAATCCTGATAATAGTGA
TGTGGACAAACTATTTATCCAGTTGGTACAAATCTACAATCAATTATTT
GAAGAAAACCCTATTAACGCAAGTAGAGTAGATGCTAAAGCGATTCTTT
CTGCACGATTGAGTAAATCAAGACGATTAGAAAATCTCATTGCTCAGCT
CCCCGGTGAGAAGAGAAATGGCTTGTTTGGGAATCTCATTGCTTTGTCA
TTGGGATTGACCCCTAATTTTAAATCAAATTTTGATTTGGCAGAAGATG
CTAAATTACAGCTTTCAAAAGATACTTACGATGATGATTTAGATAATTT
ATTGGCGCAAATTGGAGATCAATATGCTGATTTGTTTTTGGCAGCTAAG
AATTTATCAGATGCTATTTTACTTTCAGATATCCTAAGAGTAAATAGTG
AAATAACTAAGGCTCCCCTATCAGCTTCAATGATTAAGCGCTACGATGA
ACATCATCAAGACTTGACTCTTTTAAAAGCTTTAGTTCGACAACAACTT
CCAGAAAAGTATAAAGAAATCTTTTTTGATCAATCAAAAAACGGATATG
CAGGTTATATTGATGGGGGAGCTAGCCAAGAAGAATTTTATAAATTTAT
CAAACCAATTTTAGAAAAAATGGATGGTACTGAGGAATTATTGGTGAAA
CTAAATCGTGAAGATTTGCTGCGCAAGCAACGGACCTTTGACAACGGCT
CTATTCCCCATCAAATTCACTTGGGTGAGCTGCATGCTATTTTGAGAAG
ACAAGAAGACTTTTATCCATTTTTAAAAGACAATCGTGAGAAGATTGAA
AAAATCTTGACTTTTCGAATTCCTTATTATGTTGGTCCATTGGCGCGTG
GCAATAGTCGTTTTGCATGGATGACTCGGAAGTCTGAAGAAACAATTAC
CCCATGGAATTTTGAAGAAGTTGTCGATAAAGGTGCTTCAGCTCAATCA
TTTATTGAACGCATGACAAACTTTGATAAAAATCTTCCAAATGAAAAAG
TACTACCAAAACATAGTTTGCTTTATGAGTATTTTACGGTTTATAACGA
ATTGACAAAGGTCAAATATGTTACTGAGGGAATGCGAAAACCAGCATTT
CTTTCAGGTGAACAGAAGAAAGCCATTGTTGATTTACTCTTCAAAACAA
ATCGAAAAGTAACCGTTAAGCAATTAAAAGAAGATTATTTCAAAAAAAT
AGAATGTTTTGATAGTGTTGAAATTTCAGGAGTTGAAGATAGATTTAAT
GCTTCATTAGGCGCCTACCATGATTTGCTAAAAATTATTAAAGATAAAG
ATTTTTTGGATAATGAAGAAAATGAAGATATCTTAGAGGATATTGTTTT
AACATTGACCTTATTTGAAGATAGGGGGATGATTGAGGAAAGACTTAAA
ACATATGCTCACCTCTTTGATGATAAGGTGATGAAACAGCTTAAACGTC
GCCGTTATACTGGTTGGGGACGTTTGTCTCGAAAATTGATTAATGGTAT
TAGGGATAAGCAATCTGGCAAAACAATATTAGATTTTTTGAAATCAGAT
GGTTTTGCCAATCGCAATTTTATGCAGCTGATCCATGATGATAGTTTGA
CATTTAAAGAAGATATTCAAAAAGCACAGGTGTCTGGACAAGGCCATAG
TTTACATGAACAGATTGCTAACTTAGCTGGCAGTCCTGCTATTAAAAAA
GGTATTTTACAGACTGTAAAAATTGTTGATGAACTGGTCAAAGTAATGG
GGCATAAGCCAGAAAATATCGTTATTGAAATGGCACGTGAAAATCAGAC
AACTCAAAAGGGCCAGAAAAATTCGCGAGAGCGTATGAAACGAATCGAA
GAAGGTATCAAAGAATTAGGAAGTCAGATTCTTAAAGAGCATCCTGTTG
AAAATACTCAATTGCAAAATGAAAAGCTCTATCTCTATTATCTACAAAA
TGGAAGAGACATGTATGTGGACCAAGAATTAGATATTAATCGTTTAAGT
GATTATGATGTCGATCACATTGTTCCACAAAGTTTCATTAAAGACGATT
CAATAGACAATAAGGTACTAACGCGTTCTGATAAAAATCGTGGTAAATC
GGATAACGTTCCAAGTGAAGAAGTAGTCAAAAAGATGAAAAACTATTGG
AGACAACTTCTAAACGCCAAGTTAATCACTCAACGTAAGTTTGATAATT
TAACGAAAGCTGAACGTGGAGGTTTGAGTGAACTTGATAAAGCTGGTTT
TATCAAACGCCAATTGGTTGAAACTCGCCAAATCACTAAGCATGTGGCA
CAAATTTTGGATAGTCGCATGAATACTAAATACGATGAAAATGATAAAC
TTATTCGAGAGGTTAAAGTGATTACCTTAAAATCTAAATTAGTTTCTGA
CTTCCGAAAAGATTTCCAATTCTATAAAGTACGTGAGATTAACAATTAC
CATCATGCCCATGATGCGTATCTAAATGCCGTCGTTGGAACTGCTTTGA
TTAAGAAATATCCAAAACTTGAATCGGAGTTTGTCTATGGTGATTATAA
AGTTTATGATGTTCGTAAAATGATTGCTAAGTCTGAGCAAGAAATAGGC
AAAGCAACCGCAAAATATTTCTTTTACTCTAATATCATGAACTTCTTCA
AAACAGAAATTACACTTGCAAATGGAGAGATTCGCAAACGCCCTCTAAT
CGAAACTAATGGGGAAACTGGAGAAATTGTCTGGGATAAAGGGCGAGAT
TTTGCCACAGTGCGCAAAGTATTGTCCATGCCCCAAGTCAATATTGTCA
AGAAAACAGAAGTACAGACAGGCGGATTCTCCAAGGAGTCAATTTTACC
AAAAAGAAATTCGGACAAGCTTATTGCTCGTAAAAAAGACTGGGATCCA
AAAAAATATGGTGGTTTTGATAGTCCAACGGTAGCTTATTCAGTCCTAG
TGGTTGCTAAGGTGGAAAAAGGGAAATCGAAGAAGTTAAAATCCGTTAA
AGAGTTACTAGGGATCACAATTATGGAAAGAAGTTCCTTTGAAAAAAAT
CCGATTGACTTTTTAGAAGCTAAAGGATATAAGGAAGTTAAAAAAGACT
TAATCATTAAACTACCTAAATATAGTCTTTTTGAGTTAGAAAACGGTCG
TAAACGGATGCTGGCTAGTGCCGGAGAATTACAAAAAGGAAATGAGCTG
GCTCTGCCAAGCAAATATGTGAATTTTTTATATTTAGCTAGTCATTATG
AAAAGTTGAAGGGTAGTCCAGAAGATAACGAACAAAAACAATTGTTTGT
GGAGCAGCATAAGCATTATTTAGATGAGATTATTGAGCAAATCAGTGAA
TTTTCTAAGCGTGTTATTTTAGCAGATGCCAATTTAGATAAAGTTCTTA
GTGCATATAACAAACATAGAGACAAACCAATACGTGAACAAGCAGAAAA
TATTATTCATTTATTTACGTTGACGAATCTTGGAGCTCCCGCTGCTTTT
AAATATTTTGATACAACAATTGATCGTAAACGATATACGTCTACAAAAG
AAGTTTTAGATGCCACTCTTATCCATCAATCCATCACTGGTCTTTATGA
AACACGCATTGATTTGAGTCAGCTAGGAGGTGACTGA
MDKKYSIGLDIGTNSVGWAVITDDYKVPSKKFKVLGNTDRHSIKKNLIG
ALLFGSGETAEATRLKRTARRRYTRRKNRICYLQEIFSNEMAKVDDSFF
HRLEESFLVEEDKKHERHPIFGNIVDEVAYHEKYPTIYHLRKKLADSTD
KADLRLIYLALAHMIKFRGHFLIEGDLNPDNSDVDKLFIQLVQIYNQLF
EENPINASRVDAKAILSARLSKSRRLENLIAQLPGEKRNGLFGNLIALS
LGLTPNFKSNFDLAEDAKLQLSKDTYDDDLDNLLAQIGDQYADLFLAAK
NLSDAILLSDILRVNSEITKAPLSASMIKRYDEHHQDLTLLKALVRQQL
PEKYKEIFFDQSKNGYAGYIDGGASQEEFYKFIKPILEKMDGTEELLVK
LNREDLLRKQRTFDNGSIPHQIHLGELHAILRRQEDFYPFLKDNREKIE
KILTFRIPYYVGPLARGNSRFAWMTRKSEETITPWNFEEVVDKGASAQS
FIERMTNFDKNLPNEKVLPKHSLLYEYFTVYNELTKVKYVTEGMRKPAF
LSGEQKKAIVDLLFKTNRKVTVKQLKEDYFKKIECFDSVEISGVEDRFN
ASLGAYHDLLKIIKDKDFLDNEENEDILEDIVLTLTLFEDRGMIEERLK
TYAHLFDDKVMKQLKRRRYTGWGRLSRKLINGIRDKQSGKTILDFLKSD
GFANRNFMQLIHDDSLTFKEDIQKAQVSGQGHSLHEQIANLAGSPAIKK
GILQTVKIVDELVKVMGHKPENIVIEMARENQTTQKGQKNSRERMKRIE
EGIKELGSQILKEHPVENTQLQNEKLYLYYLQNGRDMYVDQELDINRLS
DYDVDHIVPQSFIKDDSIDNKVLTRSDKNRGKSDNVPSEEVVKKMKNYW
RQLLNAKLITQRKFDNLTKAERGGLSELDKAGFIKRQLVETRQITKHVA
QILDSRMNTKYDENDKLIREVKVITLKSKLVSDFRKDFQFYKVREINNY
HHAHDAYLNAVVGTALIKKYPKLESEFVYGDYKVYDVRKMIAKSEQEIG
KATAKYFFYSNIMNFFKTEITLANGEIRKRPLIETNGETGEIVWDKGRD
FATVRKVLSMPQVNIVKKTEVQTGGFSKESILPKRNSDKLIARKKDWDP
KKYGGFDSPTVAYSVLVVAKVEKGKSKKLKSVKELLGITIMERSSFEKN
PIDFLEAKGYKEVKKDLIIKLPKYSLFELENGRKRMLASAGELQKGNEL
ALPSKYVNFLYLASHYEKLKGSPEDNEQKQLFVEQHKHYLDEIIEQISE
FSKRVILADANLDKVLSAYNKHRDKPIREQAENIIHLFTLTNLGAPAAF
KYFDTTIDRKRYTSTKEVLDATLIHQSITGLYETRIDLSQLGGD

(single underline: HNH domain; double underline: RuvC domain)

[0224] In some embodiments, wild type Cas9 corresponds to, or comprises the following nucleotide and/or amino acid sequences:

ATGGATAAAAAGTATTCTATTGGTTTAGACATCGGCACTAATTCCGTTG
GATGGGCTGTCATAACCGATGAATACAAAGTACCTTCAAAGAAATTTAA
GGTGTTGGGGAACACAGACCGTCATTCGATTAAAAAGAATCTTATCGGT
GCCCTCCTATTCGATAGTGGCGAAACGGCAGAGGCGACTCGCCTGAAAC
GAACCGCTCGGAGAAGGTATACACGTCGCAAGAACCGAATATGTTACTT
ACAAGAAATTTTTAGCAATGAGATGGCCAAAGTTGACGATTCTTTCTTT
CACCGTTTGGAAGAGTCCTTCCTTGTCGAAGAGGACAAGAAACATGAAC
GGCACCCCATCTTTGGAAACATAGTAGATGAGGTGGCATATCATGAAAA
GTACCCAACGATTTATCACCTCAGAAAAAAGCTAGTTGACTCAACTGAT
AAAGCGGACCTGAGGTTAATCTACTTGGCTCTTGCCCATATGATAAAGT
TCCGTGGGCACTTTCTCATTGAGGGTGATCTAAATCCGGACAACTCGGA
TGTCGACAAACTGTTCATCCAGTTAGTACAAACCTATAATCAGTTGTTT
GAAGAGAACCCTATAAATGCAAGTGGCGTGGATGCGAAGGCTATTCTTA
GCGCCCGCCTCTCTAAATCCCGACGGCTAGAAAACCTGATCGCACAATT
ACCCGGAGAGAAGAAAAATGGGTTGTTCGGTAACCTTATAGCGCTCTCA
CTAGGCCTGACACCAAATTTTAAGTCGAACTTCGACTTAGCTGAAGATG
CCAAATTGCAGCTTAGTAAGGACACGTACGATGACGATCTCGACAATCT
ACTGGCACAAATTGGAGATCAGTATGCGGACTTATTTTTGGCTGCCAAA
AACCTTAGCGATGCAATCCTCCTATCTGACATACTGAGAGTTAATACTG
AGATTACCAAGGCGCCGTTATCCGCTTCAATGATCAAAAGGTACGATGA
ACATCACCAAGACTTGACACTTCTCAAGGCCCTAGTCCGTCAGCAACTG
CCTGAGAAATATAAGGAAATATTCTTTGATCAGTCGAAAAACGGGTACG
CAGGTTATATTGACGGCGGAGCGAGTCAAGAGGAATTCTACAAGTTTAT
CAAACCCATATTAGAGAAGATGGATGGGACGGAAGAGTTGCTTGTAAAA
CTCAATCGCGAAGATCTACTGCGAAAGCAGCGGACTTTCGACAACGGTA
GCATTCCACATCAAATCCACTTAGGCGAATTGCATGCTATACTTAGAAG
GCAGGAGGATTTTTATCCGTTCCTCAAAGACAATCGTGAAAAGATTGAG
AAAATCCTAACCTTTCGCATACCTTACTATGTGGGACCCCTGGCCCGAG
GGAACTCTCGGTTCGCATGGATGACAAGAAAGTCCGAAGAAACGATTAC
TCCATGGAATTTTGAGGAAGTTGTCGATAAAGGTGCGTCAGCTCAATCG
TTCATCGAGAGGATGACCAACTTTGACAAGAATTTACCGAACGAAAAAG
TATTGCCTAAGCACAGTTTACTTTACGAGTATTTCACAGTGTACAATGA
ACTCACGAAAGTTAAGTATGTCACTGAGGGCATGCGTAAACCCGCCTTT
CTAAGCGGAGAACAGAAGAAAGCAATAGTAGATCTGTTATTCAAGACCA
ACCGCAAAGTGACAGTTAAGCAATTGAAAGAGGACTACTTTAAGAAAAT
TGAATGCTTCGATTCTGTCGAGATCTCCGGGGTAGAAGATCGATTTAAT
GCGTCACTTGGTACGTATCATGACCTCCTAAAGATAATTAAAGATAAGG
ACTTCCTGGATAACGAAGAGAATGAAGATATCTTAGAAGATATAGTGTT
GACTCTTACCCTCTTTGAAGATCGGGAAATGATTGAGGAAAGACTAAAA
ACATACGCTCACCTGTTCGACGATAAGGTTATGAAACAGTTAAAGAGGC
GTCGCTATACGGGCTGGGGACGATTGTCGCGGAAACTTATCAACGGGAT
AAGAGACAAGCAAAGTGGTAAAACTATTCTCGATTTTCTAAAGAGCGAC
GGCTTCGCCAATAGGAACTTTATGCAGCTGATCCATGATGACTCTTTAA
CCTTCAAAGAGGATATACAAAAGGCACAGGTTTCCGGACAAGGGGACTC
ATTGCACGAACATATTGCGAATCTTGCTGGTTCGCCAGCCATCAAAAAG
GGCATACTCCAGACAGTCAAAGTAGTGGATGAGCTAGTTAAGGTCATGG
GACGTCACAAACCGGAAAACATTGTAATCGAGATGGCACGCGAAAATCA
AACGACTCAGAAGGGGCAAAAAAACAGTCGAGAGCGGATGAAGAGAATA
GAAGAGGGTATTAAAGAACTGGGCAGCCAGATCTTAAAGGAGCATCCTG
TGGAAAATACCCAATTGCAGAACGAGAAACTTTACCTCTATTACCTACA
AAATGGAAGGGACATGTATGTTGATCAGGAACTGGACATAAACCGTTTA
TCTGATTACGACGTCGATCACATTGTACCCCAATCCTTTTTGAAGGACG
ATTCAATCGACAATAAAGTGCTTACACGCTCGGATAAGAACCGAGGGAA
AAGTGACAATGTTCCAAGCGAGGAAGTCGTAAAGAAAATGAAGAACTAT
TGGCGGCAGCTCCTAAATGCGAAACTGATAACGCAAAGAAAGTTCGATA
ACTTAACTAAAGCTGAGAGGGGTGGCTTGTCTGAACTTGACAAGGCCGG
ATTTATTAAACGTCAGCTCGTGGAAACCCGCCAAATCACAAAGCATGTT
GCACAGATACTAGATTCCCGAATGAATACGAAATACGACGAGAACGATA
AGCTGATTCGGGAAGTCAAAGTAATCACTTTAAAGTCAAAATTGGTGTC
GGACTTCAGAAAGGATTTTCAATTCTATAAAGTTAGGGAGATAAATAAC
TACCACCATGCGCACGACGCTTATCTTAATGCCGTCGTAGGGACCGCAC
TCATTAAGAAATACCCGAAGCTAGAAAGTGAGTTTGTGTATGGTGATTA
CAAAGTTTATGACGTCCGTAAGATGATCGCGAAAAGCGAACAGGAGATA
GGCAAGGCTACAGCCAAATACTTCTTTTATTCTAACATTATGAATTTCT
TTAAGACGGAAATCACTCTGGCAAACGGAGAGATACGCAAACGACCTTT
AATTGAAACCAATGGGGAGACAGGTGAAATCGTATGGGATAAGGGCCGG
GACTTCGCGACGGTGAGAAAAGTTTTGTCCATGCCCCAAGTCAACATAG
TAAAGAAAACTGAGGTGCAGACCGGAGGGTTTTCAAAGGAATCGATTCT
TCCAAAAAGGAATAGTGATAAGCTCATCGCTCGTAAAAAGGACTGGGAC
CCGAAAAAGTACGGTGGCTTCGATAGCCCTACAGTTGCCTATTCTGTCC
TAGTAGTGGCAAAAGTTGAGAAGGGAAAATCCAAGAAACTGAAGTCAGT
CAAAGAATTATTGGGGATAACGATTATGGAGCGCTCGTCTTTTGAAAAG
AACCCCATCGACTTCCTTGAGGCGAAAGGTTACAAGGAAGTAAAAAAGG
ATCTCATAATTAAACTACCAAAGTATAGTCTGTTTGAGTTAGAAAATGG
CCGAAAACGGATGTTGGCTAGCGCCGGAGAGCTTCAAAAGGGGAACGAA
CTCGCACTACCGTCTAAATACGTGAATTTCCTGTATTTAGCGTCCCATT
ACGAGAAGTTGAAAGGTTCACCTGAAGATAACGAACAGAAGCAACTTTT
TGTTGAGCAGCACAAACATTATCTCGACGAAATCATAGAGCAAATTTCG
GAATTCAGTAAGAGAGTCATCCTAGCTGATGCCAATCTGGACAAAGTAT
TAAGCGCATACAACAAGCACAGGGATAAACCCATACGTGAGCAGGCGGA
AAATATTATCCATTTGTTTACTCTTACCAACCTCGGCGCTCCAGCCGCA
TTCAAGTATTTTGACACAACGATAGATCGCAAACGATACACTTCTACCA
AGGAGGTGCTAGACGCGACACTGATTCACCAATCCATCACGGGATTATA
TGAAACTCGGATAGATTTGTCACAGCTTGGGGGTGACGGATCCCCCAAG
AAGAAGAGGAAAGTCTCGAGCGACTACAAAGACCATGACGGTGATTATA
AAGATCATGACATCGATTACAAGGATGACGATGACAAGGCTGCAGGA
MDKKYSIGLAIGTNSVGWAVITDEYKVPSKKFKVLGNTDRHSIKKNLIG
ALLFDSGETAEATRLKRTARRRYTRRKNRICYLQEIFSNEMAKVDDSFF
HRLEESFLVEEDKKHERHPIFGNIVDEVAYHEKYPTIYHLRKKLVDSTD
KADLRLIYLALAHMIKFRGHFLIEGDLNPDNSDVDKLFIQLVQTYNQLF
EENPINASGVDAKAILSARLSKSRRLENLIAQLPGEKKNGLFGNLIALS
LGLTPNFKSNFDLAEDAKLQLSKDTYDDDLDNLLAQIGDQYADLFLAAK
NLSDAILLSDILRVNTEITKAPLSASMIKRYDEHHQDLTLLKALVRQQL
PEKYKEIFFDQSKNGYAGYIDGGASQEEFYKFIKPILEKMDGTEELLVK
LNREDLLRKQRTFDNGSIPHQIHLGELHAILRRQEDFYPFLKDNREKIE
KILTFRIPYYVGPLARGNSRFAWMTRKSEETITPWNFEEVVDKGASAQS
FIERMTNFDKNLPNEKVLPKHSLLYEYFTVYNELTKVKYVTEGMRKPAF
LSGEQKKAIVDLLFKTNRKVTVKQLKEDYFKKIECFDSVEISGVEDRFN
ASLGTYHDLLKIIKDKDFLDNEENEDILEDIVLTLTLFEDREMIEERLK
TYAHLFDDKVMKQLKRRRYTGWGRLSRKLINGIRDKQSGKTILDFLKSD
GFANRNFMQLIHDDSLTFKEDIQKAQVSGQGDSLHEHIANLAGSPAIKK
GILQTVKVVDELVKVMGRHKPENIVIEMARENQTTQKGQKNSRERMKRI
EEGIKELGSQILKEHPVENTQLQNEKLYLYYLQNGRDMYVDQELDINRL
SDYDVDHIVPQSFLKDDSIDNKVLTRSDKNRGKSDNVPSEEVVKKMKNY
WRQLLNAKLITQRKFDNLTKAERGGLSELDKAGFIKRQLVETRQITKHV
AQILDSRMNTKYDENDKLIREVKVITLKSKLVSDFRKDFQFYKVREINN
YHHAHDAYLNAVVGTALIKKYPKLESEFVYGDYKVYDVRKMIAKSEQEI
GKATAKYFFYSNIMNFFKTEITLANGEIRKRPLIETNGETGEIVWDKGR
DFATVRKVLSMPQVNIVKKTEVQTGGFSKESILPKRNSDKLIARKKDWD
PKKYGGFDSPTVAYSVLVVAKVEKGKSKKLKSVKELLGITIMERSSFEK
NPIDFLEAKGYKEVKKDLIIKLPKYSLFELENGRKRMLASAGELQKGNE
LALPSKYVNFLYLASHYEKLKGSPEDNEQKQLFVEQHKHYLDEIIEQIS
EFSKRVILADANLDKVLSAYNKHRDKPIREQAENIIHLFTLTNLGAPAA
FKYFDTTIDRKRYTSTKEVLDATLIHQSITGLYETRIDLSQLGGD

(single underline: HNH domain; double underline: RuvC domain).

[0225] In some embodiments, wild type Cas9 corresponds to Cas9 from Streptococcus pyogenes (NCBI Reference Sequence: NC_002737.2 (nucleotide sequence as follows); and Uniprot Reference Sequence: Q99ZW2 (amino acid sequence as follows):

ATGGATAAGAAATACTCAATAGGCTTAGATATCGGCACAAATAGCGTCG
GATGGGCGGTGATCACTGATGAATATAAGGTTCCGTCTAAAAAGTTCAA
GGTTCTGGGAAATACAGACCGCCACAGTATCAAAAAAAATCTTATAGGG
GCTCTTTTATTTGACAGTGGAGAGACAGCGGAAGCGACTCGTCTCAAAC
GGACAGCTCGTAGAAGGTATACACGTCGGAAGAATCGTATTTGTTATCT
ACAGGAGATTTTTTCAAATGAGATGGCGAAAGTAGATGATAGTTTCTTT
CATCGACTTGAAGAGTCTTTTTTGGTGGAAGAAGACAAGAAGCATGAAC
GTCATCCTATTTTTGGAAATATAGTAGATGAAGTTGCTTATCATGAGAA
ATATCCAACTATCTATCATCTGCGAAAAAAATTGGTAGATTCTACTGAT
AAAGCGGATTTGCGCTTAATCTATTTGGCCTTAGCGCATATGATTAAGT
TTCGTGGTCATTTTTTGATTGAGGGAGATTTAAATCCTGATAATAGTGA
TGTGGACAAACTATTTATCCAGTTGGTACAAACCTACAATCAATTATTT
GAAGAAAACCCTATTAACGCAAGTGGAGTAGATGCTAAAGCGATTCTTT
CTGCACGATTGAGTAAATCAAGACGATTAGAAAATCTCATTGCTCAGCT
CCCCGGTGAGAAGAAAAATGGCTTATTTGGGAATCTCATTGCTTTGTCA
TTGGGTTTGACCCCTAATTTTAAATCAAATTTTGATTTGGCAGAAGATG
CTAAATTACAGCTTTCAAAAGATACTTACGATGATGATTTAGATAATTT
ATTGGCGCAAATTGGAGATCAATATGCTGATTTGTTTTTGGCAGCTAAG
AATTTATCAGATGCTATTTTACTTTCAGATATCCTAAGAGTAAATACTG
AAATAACTAAGGCTCCCCTATCAGCTTCAATGATTAAACGCTACGATGA
ACATCATCAAGACTTGACTCTTTTAAAAGCTTTAGTTCGACAACAACTT
CCAGAAAAGTATAAAGAAATCTTTTTTGATCAATCAAAAAACGGATATG
CAGGTTATATTGATGGGGGAGCTAGCCAAGAAGAATTTTATAAATTTAT
CAAACCAATTTTAGAAAAAATGGATGGTACTGAGGAATTATTGGTGAAA
CTAAATCGTGAAGATTTGCTGCGCAAGCAACGGACCTTTGACAACGGCT
CTATTCCCCATCAAATTCACTTGGGTGAGCTGCATGCTATTTTGAGAAG
ACAAGAAGACTTTTATCCATTTTTAAAAGACAATCGTGAGAAGATTGAA
AAAATCTTGACTTTTCGAATTCCTTATTATGTTGGTCCATTGGCGCGTG
GCAATAGTCGTTTTGCATGGATGACTCGGAAGTCTGAAGAAACAATTAC
CCCATGGAATTTTGAAGAAGTTGTCGATAAAGGTGCTTCAGCTCAATCA
TTTATTGAACGCATGACAAACTTTGATAAAAATCTTCCAAATGAAAAAG
TACTACCAAAACATAGTTTGCTTTATGAGTATTTTACGGTTTATAACGA
ATTGACAAAGGTCAAATATGTTACTGAAGGAATGCGAAAACCAGCATTT
CTTTCAGGTGAACAGAAGAAAGCCATTGTTGATTTACTCTTCAAAACAA
ATCGAAAAGTAACCGTTAAGCAATTAAAAGAAGATTATTTCAAAAAAAT
AGAATGTTTTGATAGTGTTGAAATTTCAGGAGTTGAAGATAGATTTAAT
GCTTCATTAGGTACCTACCATGATTTGCTAAAAATTATTAAAGATAAAG
ATTTTTTGGATAATGAAGAAAATGAAGATATCTTAGAGGATATTGTTTT
AACATTGACCTTATTTGAAGATAGGGAGATGATTGAGGAAAGACTTAAA
ACATATGCTCACCTCTTTGATGATAAGGTGATGAAACAGCTTAAACGTC
GCCGTTATACTGGTTGGGGACGTTTGTCTCGAAAATTGATTAATGGTAT
TAGGGATAAGCAATCTGGCAAAACAATATTAGATTTTTTGAAATCAGAT
GGTTTTGCCAATCGCAATTTTATGCAGCTGATCCATGATGATAGTTTGA
CATTTAAAGAAGACATTCAAAAAGCACAAGTGTCTGGACAAGGCGATAG
TTTACATGAACATATTGCAAATTTAGCTGGTAGCCCTGCTATTAAAAAA
GGTATTTTACAGACTGTAAAAGTTGTTGATGAATTGGTCAAAGTAATGG
GGCGGCATAAGCCAGAAAATATCGTTATTGAAATGGCACGTGAAAATCA
GACAACTCAAAAGGGCCAGAAAAATTCGCGAGAGCGTATGAAACGAATC
GAAGAAGGTATCAAAGAATTAGGAAGTCAGATTCTTAAAGAGCATCCTG
TTGAAAATACTCAATTGCAAAATGAAAAGCTCTATCTCTATTATCTCCA
AAATGGAAGAGACATGTATGTGGACCAAGAATTAGATATTAATCGTTTA
AGTGATTATGATGTCGATCACATTGTTCCACAAAGTTTCCTTAAAGACG
ATTCAATAGACAATAAGGTCTTAACGCGTTCTGATAAAAATCGTGGTAA
ATCGGATAACGTTCCAAGTGAAGAAGTAGTCAAAAAGATGAAAAACTAT
TGGAGACAACTTCTAAACGCCAAGTTAATCACTCAACGTAAGTTTGATA
ATTTAACGAAAGCTGAACGTGGAGGTTTGAGTGAACTTGATAAAGCTGG
TTTTATCAAACGCCAATTGGTTGAAACTCGCCAAATCACTAAGCATGTG
GCACAAATTTTGGATAGTCGCATGAATACTAAATACGATGAAAATGATA
AACTTATTCGAGAGGTTAAAGTGATTACCTTAAAATCTAAATTAGTTTC
TGACTTCCGAAAAGATTTCCAATTCTATAAAGTACGTGAGATTAACAAT
TACCATCATGCCCATGATGCGTATCTAAATGCCGTCGTTGGAACTGCTT
TGATTAAGAAATATCCAAAACTTGAATCGGAGTTTGTCTATGGTGATTA
TAAAGTTTATGATGTTCGTAAAATGATTGCTAAGTCTGAGCAAGAAATA
GGCAAAGCAACCGCAAAATATTTCTTTTACTCTAATATCATGAACTTCT
TCAAAACAGAAATTACACTTGCAAATGGAGAGATTCGCAAACGCCCTCT
AATCGAAACTAATGGGGAAACTGGAGAAATTGTCTGGGATAAAGGGCGA
GATTTTGCCACAGTGCGCAAAGTATTGTCCATGCCCCAAGTCAATATTG
TCAAGAAAACAGAAGTACAGACAGGCGGATTCTCCAAGGAGTCAATTTT
ACCAAAAAGAAATTCGGACAAGCTTATTGCTCGTAAAAAAGACTGGGAT
CCAAAAAAATATGGTGGTTTTGATAGTCCAACGGTAGCTTATTCAGTCC
TAGTGGTTGCTAAGGTGGAAAAAGGGAAATCGAAGAAGTTAAAATCCGT
TAAAGAGTTACTAGGGATCACAATTATGGAAAGAAGTTCCTTTGAAAAA
AATCCGATTGACTTTTTAGAAGCTAAAGGATATAAGGAAGTTAAAAAAG
ACTTAATCATTAAACTACCTAAATATAGTCTTTTTGAGTTAGAAAACGG
TCGTAAACGGATGCTGGCTAGTGCCGGAGAATTACAAAAAGGAAATGAG
CTGGCTCTGCCAAGCAAATATGTGAATTTTTTATATTTAGCTAGTCATT
ATGAAAAGTTGAAGGGTAGTCCAGAAGATAACGAACAAAAACAATTGTT
TGTGGAGCAGCATAAGCATTATTTAGATGAGATTATTGAGCAAATCAGT
GAATTTTCTAAGCGTGTTATTTTAGCAGATGCCAATTTAGATAAAGTTC
TTAGTGCATATAACAAACATAGAGACAAACCAATACGTGAACAAGCAGA
AAATATTATTCATTTATTTACGTTGACGAATCTTGGAGCTCCCGCTGCT
TTTAAATATTTTGATACAACAATTGATCGTAAACGATATACGTCTACAA
AAGAAGTTTTAGATGCCACTCTTATCCATCAATCCATCACTGGTCTTTA
TGAAACACGCATTGATTTGAGTCAGCTAGGAGGTGACTGA
MDKKYSIGLDIGTNSVGWAVITDEYKVPSKKFKVLGNTDRHSIKKNLIG
ALLFDSGETAEATRLKRTARRRYTRRKNRICYLQEIFSNEMAKVDDSFF
HRLEESFLVEEDKKHERHPIFGNIVDEVAYHEKYPTIYHLRKKLVDSTD
KADLRLIYLALAHMIKFRGHFLIEGDLNPDNSDVDKLFIQLVQTYNQLF
EENPINASGVDAKAILSARLSKSRRLENLIAQLPGEKKNGLFGNLIALS
LGLTPNFKSNFDLAEDAKLQLSKDTYDDDLDNLLAQIGDQYADLFLAAK
NLSDAILLSDILRVNTEITKAPLSASMIKRYDEHHQDLTLLKALVRQQL
PEKYKEIFFDQSKNGYAGYIDGGASQEEFYKFIKPILEKMDGTEELLVK
LNREDLLRKQRTFDNGSIPHQIHLGELHAILRRQEDFYPFLKDNREKIE
KILTFRIPYYVGPLARGNSRFAWMTRKSEETITPWNFEEVVDKGASAQS
FIERMTNFDKNLPNEKVLPKHSLLYEYFTVYNELTKVKYVTEGMRKPAF
LSGEQKKAIVDLLFKTNRKVTVKQLKEDYFKKIECFDSVEISGVEDRFN
ASLGTYHDLLKIIKDKDFLDNEENEDILEDIVLTLTLFEDREMIEERLK
TYAHLFDDKVMKQLKRRRYTGWGRLSRKLINGIRDKQSGKTILDFLKSD
GFANRNFMQLIHDDSLTFKEDIQKAQVSGQGDSLHEHIANLAGSPAIKK
GILQTVKVVDELVKVMGRHKPENIVIEMARENQTTQKGQKNSRERMKRI
EEGIKELGSQILKEHPVENTQLQNEKLYLYYLQNGRDMYVDQELDINRL
SDYDVDHIVPQSFLKDDSIDNKVLTRSDKNRGKSDNVPSEEVVKKMKNY
WRQLLNAKLITQRKFDNLTKAERGGLSELDKAGFIKRQLVETRQITKHV
AQILDSRMNTKYDENDKLIREVKVITLKSKLVSDFRKDFQFYKVREINN
YHHAHDAYLNAVVGTALIKKYPKLESEFVYGDYKVYDVRKMIAKSEQEI
GKATAKYFFYSNIMNFFKTEITLANGEIRKRPLIETNGETGEIVWDKGR
DFATVRKVLSMPQVNIVKKTEVQTGGFSKESILPKRNSDKLIARKKDWD
PKKYGGFDSPTVAYSVLVVAKVEKGKSKKLKSVKELLGITIMERSSFEK
NPIDFLEAKGYKEVKKDLIIKLPKYSLFELENGRKRMLASAGELQKGNE
LALPSKYVNFLYLASHYEKLKGSPEDNEQKQLFVEQHKHYLDEIIEQIS
EFSKRVILADANLDKVLSAYNKHRDKPIREQAENIIHLFTLTNLGAPAA
FKYFDTTIDRKRYTSTKEVLDATLIHQSITGLYETRIDLSQLGGD

(single underline: HNH domain; double underline: RuvC domain)

[0226] In some embodiments, Cas9 refers to Cas9 from: Corynebacterium ulcerans (NCBI Refs: NC_015683.1, NC_017317.1); Corynebacterium diphtheria (NCBI Refs: NC_016782.1, NC_016786.1); Spiroplasma syrphidicola (NCBI Ref: NC_021284.1); Prevotella intermedia (NCBI Ref: NC_017861.1); Spiroplasma taiwanense (NCBI Ref: NC_021846.1); Streptococcus iniae (NCBI Ref: NC_021314.1); Belliella baltica (NCBI Ref: NC_018010.1); Psychroflexus torquisl (NCBI Ref: NC_018721.1); Streptococcus thermophilus (NCBI Ref: YP_820832.1), Listeria innocua (NCBI Ref: NP_472073.1), Campylobacter jejuni (NCBI Ref: YP_002344900.1) or Neisseria meningitidis (NCBI Ref: YP_002342100.1) or to a Cas9 from any other organism.

[0227] It should be appreciated that additional Cas9 proteins (e.g., a nuclease dead Cas9 (dCas9), a Cas9 nickase (nCas9), or a nuclease active Cas9), including variants and homologs thereof, are within the scope of this disclosure. Exemplary Cas9 proteins include, without limitation, those provided below. In some embodiments, the Cas9 protein is a nuclease dead Cas9 (dCas9). In some embodiments, the Cas9 protein is a Cas9 nickase (nCas9). In some embodiments, the Cas9 protein is a nuclease active Cas9.

[0228] In some embodiments, the Cas9 domain is a nuclease-inactive Cas9 domain (dCas9). For example, the dCas9 domain may bind to a duplexed nucleic acid molecule (e.g., via a gRNA molecule) without cleaving either strand of the duplexed nucleic acid molecule. In some embodiments, the nuclease-inactive dCas9 domain comprises a D10X mutation and a H840X mutation of the amino acid sequence set forth herein, or a corresponding mutation in any of the amino acid sequences provided herein, wherein X is any amino acid change. In some embodiments, the nuclease-inactive dCas9 domain comprises a D10A mutation and a H840A mutation of the amino acid sequence set forth herein, or a corresponding mutation in any of the amino acid sequences provided herein. As one example, a nuclease-inactive Cas9 domain comprises the amino acid sequence set forth in Cloning vector pPlatTET-gRNA2 (Accession No. BAV54124).

[0229] The amino acid sequence of an exemplary catalytically inactive Cas9 (dCas9) is as follows:

MDKKYSIGLAIGTNSVGWAVITDEYKVPSKKFKVLGNTDRHSIKKNLIGA
LLFDSGETAEATRLKRTARRRYTRRKNRICYLQEIFSNEMAKVDDSFFHR
LEESFLVEEDKKHERHPIFGNIVDEVAYHEKYPTIYHLRKKLVDSTDKAD
LRLIYLALAHMIKFRGHFLIEGDLNPDNSDVDKLFIQLVQTYNQLFEENP
INASGVDAKAILSARLSKSRRLENLIAQLPGEKKNGLFGNLIALSLGLTP
NFKSNFDLAEDAKLQLSKDTYDDDLDNLLAQIGDQYADLFLAAKNLSDAI
LLSDILRVNTEITKAPLSASMIKRYDEHHQDLTLLKALVRQQLPEKYKEI
FFDQSKNGYAGYIDGGASQEEFYKFIKPILEKMDGTEELLVKLNREDLLR
KQRTFDNGSIPHQIHLGELHAILRRQEDFYPFLKDNREKIEKILTFRIPY
YVGPLARGNSRFAWMTRKSEETITPWNFEEVVDKGASAQSFIERMTNFDK
NLPNEKVLPKHSLLYEYFTVYNELTKVKYVTEGMRKPAFLSGEQKKAIVD
LLFKTNRKVTVKQLKEDYFKKIECFDSVEISGVEDRFNASLGTYHDLLKI
IKDKDFLDNEENEDILEDIVLTLTLFEDREMIEERLKTYAHLFDDKVMKQ
LKRRRYTGWGRLSRKLINGIRDKQSGKTILDFLKSDGFANRNFMQLIHDD
SLTFKEDIQKAQVSGQGDSLHEHIANLAGSPAIKKGILQTVKVVDELVKV
MGRHKPENIVIEMARENQTTQKGQKNSRERMKRIEEGIKELGSQILKEHP
VENTQLQNEKLYLYYLQNGRDMYVDQELDINRLSDYDVDAIVPQSFLKDD
SIDNKVLTRSDKNRGKSDNVPSEEVVKKMKNYWRQLLNAKLITQRKFDNL
TKAERGGLSELDKAGFIKRQLVETRQITKHVAQILDSRMNTKYDENDKLI
REVKVITLKSKLVSDFRKDFQFYKVREINNYHHAHDAYLNAVVGTALIKK
YPKLESEFVYGDYKVYDVRKMIAKSEQEIGKATAKYFFYSNIMNFFKTEI
TLANGEIRKRPLIETNGETGEIVWDKGRDFATVRKVLSMPQVNIVKKTEV
QTGGFSKESILPKRNSDKLIARKKDWDPKKYGGFDSPTVAYSVLVVAKVE
KGKSKKLKSVKELLGITIMERSSFEKNPIDFLEAKGYKEVKKDLIIKLPK
YSLFELENGRKRMLASAGELQKGNELALPSKYVNFLYLASHYEKLKGSPE
DNEQKQLFVEQHKHYLDEIIEQISEFSKRVILADANLDKVLSAYNKHRDK
PIREQAENIIHLFTLTNLGAPAAFKYFDTTIDRKRYTSTKEVLDATLIHQ
SITGLYETRIDLSQLGGD

(see, e.g., Qi et al., “Repurposing CRISPR as an RNA-guided platform for sequence-specific control of gene expression.” Cell. 2013; 152(5):1173-83, the entire contents of which are incorporated herein by reference).

[0230] In some embodiments, a Cas9 nuclease has an inactive (e.g., an inactivated) DNA cleavage domain, that is, the Cas9 is a nickase, referred to as an “nCas9” protein (for “nickase” Cas9). A nuclease-inactivated Cas9 protein may interchangeably be referred to as a “dCas9” protein (for nuclease-“dead” Cas9) or catalytically inactive Cas9. Methods for generating a Cas9 protein (or a fragment thereof) having an inactive DNA cleavage domain are known (See, e.g., Jinek et al., Science. 337:816-821(2012); Qi et al., “Repurposing CRISPR as an RNA-Guided Platform for Sequence-Specific Control of Gene Expression” (2013) Cell. 28; 152(5):1173-83, the entire contents of each of which are incorporated herein by reference). For example, the DNA cleavage domain of Cas9 is known to include two subdomains, the HNH nuclease subdomain and the RuvC1 subdomain. The HNH subdomain cleaves the strand complementary to the gRNA, whereas the RuvC1 subdomain cleaves the non-complementary strand. Mutations within these subdomains can silence the nuclease activity of Cas9. For example, the mutations D10A and H840A completely inactivate the nuclease activity of S. pyogenes Cas9 (Jinek et al., Science. 337:816-821(2012); Qi et al., Cell. 28; 152(5):1173-83 (2013)).

[0231] In some embodiments, the dCas9 domain comprises an amino acid sequence that is at least 60%, at least 65%, at least 70%, at least 75%, at least 80%, at least 85%, at least 90%, at least 95%, at least 96%, at least 97%, at least 98%, at least 99%, or at least 99.5% identical to any one of the dCas9 domains provided herein. In some embodiments, the Cas9 domain comprises an amino acid sequences that has 1, 2, 3, 4, 5, 6, 7, 8, 9, 10, 11, 12, 13, 14, 15, 16, 17, 18, 19, 20, 21, 22, 21, 24, 25, 26, 27, 28, 29, 30, 31, 32, 33, 34, 35, 36, 37, 38, 39, 40, 41, 42, 43, 44, 45, 46, 47, 48, 49, 50 or more or more mutations compared to any one of the amino acid sequences set forth herein. In some embodiments, the Cas9 domain comprises an amino acid sequence that has at least 10, at least 15, at least 20, at least 30, at least 40, at least 50, at least 60, at least 70, at least 80, at least 90, at least 100, at least 150, at least 200, at least 250, at least 300, at least 350, at least 400, at least 500, at least 600, at least 700, at least 800, at least 900, at least 1000, at least 1100, or at least 1200 identical contiguous amino acid residues as compared to any one of the amino acid sequences set forth herein.

[0232] In some embodiments, dCas9 corresponds to, or comprises in part or in whole, a Cas9 amino acid sequence having one or more mutations that inactivate the Cas9 nuclease activity. For example, in some embodiments, a dCas9 domain comprises D10A and an H840A mutation or corresponding mutations in another Cas9.

[0233] In some embodiments, the dCas9 comprises the amino acid sequence of dCas9 (D10A and H840A):

MDKKYSIGLAIGTNSVGWAVITDEYKVPSKKFKVLGNTDRHSIKKNLIG
ALLFDSGETAEATRLKRTARRRYTRRKNRICYLQEIFSNEMAKVDDSFF
HRLEESFLVEEDKKHERHPIFGNIVDEVAYHEKYPTIYHLRKKLVDSTD
KADLRLIYLALAHMIKFRGHFLIEGDLNPDNSDVDKLFIQLVQTYNQLF
EENPINASGVDAKAILSARLSKSRRLENLIAQLPGEKKNGLFGNLIALS
LGLTPNFKSNFDLAEDAKLQLSKDTYDDDLDNLLAQIGDQYADLFLAAK
NLSDAILLSDILRVNTEITKAPLSASMIKRYDEHHQDLTLLKALVRQQL
PEKYKEIFFDQSKNGYAGYIDGGASQEEFYKFIKPILEKMDGTEELLVK
LNREDLLRKQRTFDNGSIPHQIHLGELHAILRRQEDFYPFLKDNREKIE
KILTFRIPYYVGPLARGNSRFAWMTRKSEETITPWNFEEVVDKGASAQS
FIERMTNFDKNLPNEKVLPKHSLLYEYFTVYNELTKVKYVTEGMRKPAF
LSGEQKKAIVDLLFKTNRKVTVKQLKEDYFKKIECFDSVEISGVEDRFN
ASLGTYHDLLKIIKDKDFLDNEENEDILEDIVLTLTLFEDREMIEERLK
TYAHLFDDKVMKQLKRRRYTGWGRLSRKLINGIRDKQSGKTILDFLKSD
GFANRNFMQLIHDDSLTFKEDIQKAQVSGQGDSLHEHIANLAGSPAIKK
GILQTVKVVDELVKVMGRHKPENIVIEMARENQTTQKGQKNSRERMKRI
EEGIKELGSQILKEHPVENTQLQNEKLYLYYLQNGRDMYVDQELDINRL
SDYDVDAIVPQSFLKDDSIDNKVLTRSDKNRGKSDNVPSEEVVKKMKNY
WRQLLNAKLITQRKFDNLTKAERGGLSELDKAGFIKRQLVETRQITKHV
AQILDSRMNTKYDENDKLIREVKVITLKSKLVSDFRKDFQFYKVREINN
YHHAHDAYLNAVVGTALIKKYPKLESEFVYGDYKVYDVRKMIAKSEQEI
GKATAKYFFYSNIMNFFKTEITLANGEIRKRPLIETNGETGEIVWDKGR
DFATVRKVLSMPQVNIVKKTEVQTGGFSKESILPKRNSDKLIARKKDWD
PKKYGGFDSPTVAYSVLVVAKVEKGKSKKLKSVKELLGITIMERSSFEK
NPIDFLEAKGYKEVKKDLIIKLPKYSLFELENGRKRMLASAGELQKGNE
LALPSKYVNFLYLASHYEKLKGSPEDNEQKQLFVEQHKHYLDEIIEQIS
EFSKRVILADANLDKVLSAYNKHRDKPIREQAENIIHLFTLTNLGAPAA
FKYFDTTIDRKRYTSTKEVLDATLIHQSITGLYETRIDLSQLGGD

(single underline: HNH domain; double underline: RuvC domain).

[0234] In some embodiments, the Cas9 domain comprises a D10A mutation, while the residue at position 840 remains a histidine in the amino acid sequence provided above, or at corresponding positions in any of the amino acid sequences provided herein.

[0235] In other embodiments, dCas9 variants having mutations other than D10A and H840A are provided, which, e.g., result in nuclease inactivated Cas9 (dCas9). Such mutations, by way of example, include other amino acid substitutions at D10 and H840, or other substitutions within the nuclease domains of Cas9 (e.g., substitutions in the HNH nuclease subdomain and/or the RuvC1 subdomain). In some embodiments, variants or homologues of dCas9 are provided which are at least about 70% identical, at least about 80% identical, at least about 90% identical, at least about 95% identical, at least about 98% identical, at least about 99% identical, at least about 99.5% identical, or at least about 99.9% identical. In some embodiments, variants of dCas9 are provided having amino acid sequences which are shorter, or longer, by about 5 amino acids, by about 10 amino acids, by about 15 amino acids, by about 20 amino acids, by about 25 amino acids, by about 30 amino acids, by about 40 amino acids, by about 50 amino acids, by about 75 amino acids, by about 100 amino acids or more.

[0236] In some embodiments, the Cas9 domain is a Cas9 nickase. The Cas9 nickase may be a Cas9 protein that is capable of cleaving only one strand of a duplexed nucleic acid molecule (e.g., a duplexed DNA molecule). In some embodiments, the Cas9 nickase cleaves the target strand of a duplexed nucleic acid molecule, meaning that the Cas9 nickase cleaves the strand that is base paired to (complementary to) a gRNA (e.g., an sgRNA) that is bound to the Cas9. In some embodiments, a Cas9 nickase comprises a D10A mutation and has a histidine at position 840. In some embodiments, the Cas9 nickase cleaves the non-target, non-base-edited strand of a duplexed nucleic acid molecule, meaning that the Cas9 nickase cleaves the strand that is not base paired to a gRNA (e.g., an sgRNA) that is bound to the Cas9. In some embodiments, a Cas9 nickase comprises an H840A mutation and has an aspartic acid residue at position 10, or a corresponding mutation. In some embodiments, the Cas9 nickase comprises an amino acid sequence that is at least 60%, at least 65%, at least 70%, at least 75%, at least 80%, at least 85%, at least 90%, at least 95%, at least 96%, at least 97%, at least 98%, at least 99%, or at least 99.5% identical to any one of the Cas9 nickases provided herein. Additional suitable Cas9 nickases will be apparent to those of skill in the art based on this disclosure and knowledge in the field, and are within the scope of this disclosure.

[0237] The amino acid sequence of an exemplary catalytically Cas9 nickase (nCas9) is as follows:

MDKKYSIGLAIGTNSVGWAVITDEYKVPSKKFKVLGNTDRHSIKKNLIGALLFDSGETAEAT
RLKRTARRRYTRRKNRICYLQEIFSNEMAKVDDSFFHRLEESFLVEEDKKHERHPIFGNIVD
EVAYHEKYPTIYHLRKKLVDSTDKADLRLIYLALAHMIKFRGHFLIEGDLNPDNSDVDKLFI
QLVQTYNQLFEENPINASGVDAKAILSARLSKSRRLENLIAQLPGEKKNGLFGNLIALSLGL
TPNFKSNFDLAEDAKLQLSKDTYDDDLDNLLAQIGDQYADLFLAAKNLSDAILLSDILRVNT
EITKAPLSASMIKRYDEHHQDLTLLKALVRQQLPEKYKEIFFDQSKNGYAGYIDGGASQEEF
YKFIKPILEKMDGTEELLVKLNREDLLRKQRTFDNGSIPHQIHLGELHAILRRQEDFYPFLK
DNREKIEKILTFRIPYYVGPLARGNSRFAWMTRKSEETITPWNFEEVVDKGASAQSFIERMT
NFDKNLPNEKVLPKHSLLYEYFTVYNELTKVKYVTEGMRKPAFLSGEQKKAIVDLLFKTNRK
VTVKQLKEDYFKKIECFDSVEISGVEDRFNASLGTYHDLLKIIKDKDFLDNEENEDILEDIV
LTLTLFEDREMIEERLKTYAHLFDDKVMKQLKRRRYTGWGRLSRKLINGIRDKQSGKTILDF
LKSDGFANRNFMQLIHDDSLTFKEDIQKAQVSGQGDSLHEHIANLAGSPAIKKGILQTVKVV
DELVKVMGRHKPENIVIEMARENQTTQKGQKNSRERMKRIEEGIKELGSQILKEHPVENTQL
QNEKLYLYYLQNGRDMYVDQELDINRLSDYDVDHIVPQSFLKDDSIDNKVLTRSDKNRGKSD
NVPSEEVVKKMKNYWRQLLNAKLITQRKFDNLTKAERGGLSELDKAGFIKRQLVETRQITKH
VAQILDSRMNTKYDENDKLIREVKVITLKSKLVSDFRKDFQFYKVREINNYHHAHDAYLNAV
VGTALIKKYPKLESEFVYGDYKVYDVRKMIAKSEQEIGKATAKYFFYSNIMNFFKTEITLAN
GEIRKRPLIETNGETGEIVWDKGRDFATVRKVLSMPQVNIVKKTEVQTGGFSKESILPKRNS
DKLIARKKDWDPKKYGGFDSPTVAYSVLVVAKVEKGKSKKLKSVKELLGITIMERSSFEKNP
IDFLEAKGYKEVKKDLIIKLPKYSLFELENGRKRMLASAGELQKGNELALPSKYVNFLYLAS
HYEKLKGSPEDNEQKQLFVEQHKHYLDEIIEQISEFSKRVILADANLDKVLSAYNKHRDKPI
REQAENIIHLFTLTNLGAPAAFKYFDTTIDRKRYTSTKEVLDATLIHQSITGLYETRIDLSQ
LGGD

[0238] In some embodiments, Cas9 refers to a Cas9 from archaea (e.g., nanoarchaea), which constitute a domain and kingdom of single-celled prokaryotic microbes. In some embodiments, the programmable nucleotide binding protein may be a CasX or CasY protein, which have been described in, for example, Burstein et al., “New CRISPR-Cas systems from uncultivated microbes.” Cell Res. 2017 Feb. 21. doi: 10.1038/cr.2017.21, the entire contents of which is hereby incorporated by reference. Using genome-resolved metagenomics, a number of CRISPR-Cas systems were identified, including the first reported Cas9 in the archaeal domain of life. This divergent Cas9 protein was found in little-studied nanoarchaea as part of an active CRISPR-Cas system. In bacteria, two previously unknown systems were discovered, CRISPR-CasX and CRISPR-CasY, which are among the most compact systems yet discovered. In some embodiments, in a base editor system described herein Cas9 is replaced by CasX, or a variant of CasX. In some embodiments, in a base editor system described herein Cas9 is replaced by CasY, or a variant of CasY. It should be appreciated that other RNA-guided DNA binding proteins may be used as a nucleic acid programmable DNA binding protein (napDNAbp), and are within the scope of this disclosure.

[0239] In some embodiments, the nucleic acid programmable DNA binding protein (napDNAbp) of any of the fusion proteins provided herein may be a CasX or CasY protein. In some embodiments, the napDNAbp is a CasX protein. In some embodiments, the napDNAbp is a CasY protein. In some embodiments, the napDNAbp comprises an amino acid sequence that is at least 85%, at least 90%, at least 91%, at least 92%, at least 93%, at least 94%, at least 95%, at least 96%, at least 97%, at least 98%, at least 99%, or at ease 99.5% identical to a naturally-occurring CasX or CasY protein. In some embodiments, the programmable nucleotide binding protein is a naturally-occurring CasX or CasY protein. In some embodiments, the programmable nucleotide binding protein comprises an amino acid sequence that is at least 85%, at least 90%, at least 91%, at least 92%, at least 93%, at least 94%, at least 95%, at least 96%, at least 97%, at least 98%, at least 99%, or at ease 99.5% identical to any CasX or CasY protein described herein. It should be appreciated that CasX and CasY from other bacterial species may also be used in accordance with the present disclosure.

[0240] An exemplary CasX ((uniprot.org/uniprot/FONN87; uniprot.org/uniprot/FONH53) tr∛F0NN87∛F0NN87_SULIHCRISPR-associatedCasx protein OS=Sulfolobus islandicus (strain HVE10/4) GN=SiH_0402 PE=4 SV=1) amino acid sequence is as follows:

MEVPLYNIFGDNYIIQVATEAENSTIYNNKVEIDDEELRNVLNLAYKIAK
NNEDAAAERRGKAKKKKGEEGETTTSNIILPLSGNDKNPWTETLKCYNFP
TTVALSEVFKNFSQVKECEEVSAPSFVKPEFYEFGRSPGMVERTRRVKLE
VEPHYLIIAAAGWVLTRLGKAKVSEGDYVGVNVFTPTRGILYSLIQNVNG
IVPGIKPETAFGLWIARKVVSSVTNPNVSVVRIYTISDAVGQNPTTINGG
FSIDLTKLLEKRYLLSERLEAIARNALSISSNMRERYIVLANYIYEYLTG
SKRLEDLLYFANRDLIMNLNSDDGKVRDLKLISAYVNGELIRGEG.

[0241] An exemplary CasX (>tr|F0NH53|F0NH53_SULIR CRISPR associated protein, Casx OS=Sulfolobus islandicus (strain REY15A) GN=SiRe_0771 PE=4 SV=1) amino acid sequence is as follows:

MEVPLYNIFGDNYIIQVATEAENSTIYNNKVEIDDEELRNVLNLAYKIAK
NNEDAAAERRGKAKKKKGEEGETTTSNIILPLSGNDKNPWTETLKCYNFP
TTVALSEVFKNFSQVKECEEVSAPSFVKPEFYKFGRSPGMVERTRRVKLE
VEPHYLIMAAAGWVLTRLGKAKVSEGDYVGVNVFTPTRGILYSLIQNVNG
IVPGIKPETAFGLWIARKVVSSVTNPNVSVVSIYTISDAVGQNPTTINGG
FSIDLTKLLEKRDLLSERLEAIARNALSISSNMRERYIVLANYIYEYLTG
SKRLEDLLYFANRDLIMNLNSDDGKVRDLKLISAYVNGELIRGEG.

[0242] Deltaproteobacteria CasX

MEKRINKIRKKLSADNATKPVSRSGPMKTLLVRVMTDDLKKRLEKRRKKPEVMPQVISNNAA
NNLRMLLDDYTKMKEAILQVYWQEFKDDHVGLMCKFAQPASKKIDQNKLKPEMDEKGNLTTA
GFACSQCGQPLFVYKLEQVSEKGKAYTNYFGRCNVAEHEKLILLAQLKPVKDSDEAVTYSLG
KFGQRALDFYSIHVTKESTHPVKPLAQIAGNRYASGPVGKALSDACMGTIASFLSKYQDIII
EHQKVVKGNQKRLESLRELAGKENLEYPSVTLPPQPHTKEGVDfAYNEVIARVRMWVNLNLW
QKLKLSRDDAKPLLRLKGFPSFPVVERRENEVDWWNTINEVKKLIDAKRDMGRVFWSGVTAE
KRNTILEGYNYLPNENDHKKREGSLENPKKPAKRQFGDLLLYLEKKYAGDWGKVFDEAWERI
DKKIAGLTSHIEREEARNAEDAQSKAVLTDWLRAKASFVLERLKEMDEKEFYACEIQLQKWY
GDLRGNPFAVEAENRVVDISGFSIGSDGHSIQYRNLLAWKYLENGKREFYLLMNYGKKGRIR
FTDGTDIKKSGKWQGLLYGGGKAKVIDLTFDPDDEQLIILPLAFGTRQGREFIWNDLLSLET
GLIKLANGRVIEKTIYNKKIGRDEPALFVALTFERREVVDPSNIKPVNLIGVARGENIPAVI
ALTDPEGCPLPEFKDSSGGPTDILRIGEGYKEKQRAIQAAKEVEQRRAGGYSRKFASKSRNL
ADDMVRNSARDLFYHAVTHDAVLVFANLSRGFGRQGKRTFMTERQYTKMEDWLTAKLAYEGL
TSKTYLSKTLAQYTSKTCSNCGFTITYADMDVMLVRLKKTSDGWATTLNNKELKAEYQITYY
NRYKRQTVEKELSAELDRLSEESGNNDISKWTKGRRDEALFLLKKRFSHRPVQEQFVCLDCG
HEVHAAEQAALNIARSWLFLNSNSTEFKSYKSGKQPFVGAWQAFYKRRLKEVWKPNA

[0243] An exemplary CasY ((ncbi.nlm.nih.gov/protein/APG80656.1)>APG80656.1 CRISPR-associated protein CasY [uncultured Parcubacteria group bacterium]) amino acid sequence is as follows:

MSKRHPRISGVKGYRLHAQRLEYTGKSGAMRTIKYPLYSSPSGGRTVPREIVSAINDDYVGL
YGLSNFDDLYNAEKRNEEKVYSVLDFWYDCVQYGAVFSYTAPGLLKNVAEVRGGSYELTKTL
KGSHLYDELQIDKVIKFLNKKEISRANGSLDKLKKDIIDCFKAEYRERHKDQCNKLADDIKN
AKKDAGASLGERQKKLFRDFFGISEQSENDKPSFTNPLNLTCCLLPFDTVNNNRNRGEVLFN
KLKEYAQKLDKNEGSLEMWEYIGIGNSGTAFSNFLGEGFLGRLRENKITELKKAMMDITDAW
RGQEQEEELEKRLRILAALTIKLREPKFDNHWGGYRSDINGKLSSWLQNYINQTVKIKEDLK
GHKKDLKKAKEMINRFGESDTKEEAVVSSLLESIEKIVPDDSADDEKPDIPAIAIYRRFLSD
GRLTLNRFVQREDVQEALIKERLEAEKKKKPKKRKKKSDAEDEKETIDFKELFPHLAKPLKL
VPNEYGDSKRELYKKYKNAAIYTDALWKAVEKIYKSAFSSSLKNSEFDTDFDKDFEIKRLQK
IFSVYRRFNTDKWKPIVKNSFAPYCDIVSLAENEVLYKPKQSRSRKSAAIDKNRVRLPSTEN
IAKAGIALARELSVAGFDWKDLLKKEEHEEYIDLIELHKTALALLLAVTETQLDISALDFVE
NGTVKDFMKTRDGNLVLEGRFLEMFSQSIVFSELRGLAGLMSRKEFITRSAIQTMNGKQAEL
LYIPHEFQSAKITTPKEMSRAFLDLAPAEFATSLEPESLSEKSLLKLKQMRYYPHYFGYELT
RTGQGIDGGVAENALRLEKSPVKKREIKCKQYKTLGRGQNKIVLYVRSSYYQTQFLEWFLHR
PKNVQTDVAVSGSFLIDEKKVKTRWNYDALTVALEPVSGSERVFVSQPFTIFPEKSAEEEGQ
RYLGIDIGEYGIAYTALEITGDSAKILDQNFISDPQLKTLREEVKGLKLDQRRGTFAMPSTK
IARIRESLVHSLRNRIHHLALKHKAKIVYELEVSRFEEGKQKIKKVYATLKKADVYSEIDAD
KNLQTTVWGKLAVASEISASYTSQFCGACKKLWRAEMQVDETITTQELIGTVRVIKGGTLID
AIKDFMRPPIFDENDTPFPKYRDFCDKHHISKKMRGNSCLFICPFCRANADADIQASQTIAL
LRYVKEEKKVEDYFERFRKLKNIKVLGQMKKI.

[0244] In some embodiments, the nucleic acid programmable DNA binding protein (napDNAbp) is a single effector of a microbial CRISPR-Cas system. Single effectors of microbial CRISPR-Cas systems include, without limitation, Cas9, Cpf1, Cas12b/C2c1, and Cas12c/C2c3. Typically, microbial CRISPR-Cas systems are divided into Class 1 and Class 2 systems. Class 1 systems have multisubunit effector complexes, while Class 2 systems have a single protein effector. For example, Cas9 and Cpf1 are Class 2 effectors. In addition to Cas9 and Cpf1, three distinct Class 2 CRISPR-Cas systems (Cas12b/C2c1, and Cas12c/C2c3) have been described by Shmakov et al., “Discovery and Functional Characterization of Diverse Class 2 CRISPR Cas Systems”, Mol. Cell, 2015 Nov. 5; 60(3): 385-397, the entire contents of which is hereby incorporated by reference. Effectors of two of the systems, Cas12b/C2c1, and Cas12c/C2c3, contain RuvC-like endonuclease domains related to Cpf1. A third system contains an effector with two predicated HEPN RNase domains. Production of mature CRISPR RNA is tracrRNA-independent, unlike production of CRISPR RNA by Cas12b/C2c1. Cas12b/C2c1 depends on both CRISPR RNA and tracrRNA for DNA cleavage.

[0245] The crystal structure of Alicyclobaccillus acidoterrastris Cas12b/C2c1 (AacC2c1) has been reported in complex with a chimeric single-molecule guide RNA (sgRNA). See e.g., Liu et al., “C2c1-sgRNA Complex Structure Reveals RNA-Guided DNA Cleavage Mechanism”, Mol. Cell, 2017 Jan. 19; 65(2):310-322, the entire contents of which are hereby incorporated by reference. The crystal structure has also been reported in Alicyclobacillus acidoterrestris C2c1 bound to target DNAs as ternary complexes. See e.g., Yang et al., “PAM-dependent Target DNA Recognition and Cleavage by C2C1 CRISPR-Cas endonuclease”, Cell, 2016 Dec. 15; 167(7):1814-1828, the entire contents of which are hereby incorporated by reference. Catalytically competent conformations of AacC2c1, both with target and non-target DNA strands, have been captured independently positioned within a single RuvC catalytic pocket, with Cas12b/C2c1-mediated cleavage resulting in a staggered seven-nucleotide break of target DNA. Structural comparisons between Cas12b/C2c1 ternary complexes and previously identified Cas9 and Cpf1 counterparts demonstrate the diversity of mechanisms used by CRISPR-Cas9 systems.

[0246] In some embodiments, the nucleic acid programmable DNA binding protein (napDNAbp) of any of the fusion proteins provided herein may be a Cas12b/C2c1, or a Cas12c/C2c3 protein. In some embodiments, the napDNAbp is a Cas12b/C2c1 protein. In some embodiments, the napDNAbp is a Cas12c/C2c3 protein. In some embodiments, the napDNAbp comprises an amino acid sequence that is at least 85%, at least 90%, at least 91%, at least 92%, at least 93%, at least 94%, at least 95%, at least 96%, at least 97%, at least 98%, at least 99%, or at ease 99.5% identical to a naturally-occurring Cas12b/C2c1 or Cas12c/C2c3 protein. In some embodiments, the napDNAbp is a naturally-occurring Cas12b/C2c1 or Cas12c/C2c3 protein. In some embodiments, the napDNAbp comprises an amino acid sequence that is at least 85%, at least 90%, at least 91%, at least 92%, at least 93%, at least 94%, at least 95%, at least 96%, at least 97%, at least 98%, at least 99%, or at ease 99.5% identical to any one of the napDNAbp sequences provided herein. It should be appreciated that Cas12b/C2c1 or Cas12c/C2c3 from other bacterial species may also be used in accordance with the present disclosure.

[0247] A Cas12b/C2c1 ((uniprot.org/uniprot/T0D7A2#2) sp|T0D7A2|C2C1_ALIAG CRISPR-associated endonuclease C2c1 OS=Alicyclobacillus acido-terrestris (strain ATCC 49025/DSM 3922/CIP 106132/NCIMB 13137/GD3B) GN=c2c1 PE=1 SV=1) amino acid sequence is as follows:

MAVKSIKVKLRLDDMPEIRAGLWKLHKEVNAGVRYYTEWLSLLRQENLYRRSPNGDGEQECD
KTAEECKAELLERLRARQVENGHRGPAGSDDELLQLARQLYELLVPQAIGAKGDAQQIARKE
LSPLADKDAVGGLGIAKAGNKPRWVRMREAGEPGWEEEKEKAETRKSADRTADVLRALADFG
LKPLMRVYTDSEMSSVEWKPLRKGQAVRTWDRDMFQQAIERMMSWESWNQRVGQEYAKLVEQ
KNRFEQKNFVGQEHLVHLVNQLQQDMKEASPGLESKEQTAHYVTGRALRGSDKVFEKWGKLA
PDAPFDLYDAEIKNVQRRNTRRFGSHDLFAKLAEPEYQALWREDASFLTRYAVYNSILRKLN
HAKMFATFTLPDATAHPIWTRFDKLGGNLHQYTFLFNEFGERRHAIRFHKLLKVENGVAREV
DDVTVPISMSEQLDNLLPRDPNEPIALYFRDYGAEQHFTGEFGGAKIQCRRDQLAHMHRRRG
ARDVYLNVSVRVQSQSEARGERRPPYAAVFRLVGDNHRAFVHFDKLSDYLAEHPDDGKLGSE
GLLSGLRVMSVDLGLRTSASISVFRVARKDELKPNSKGRVPFFFPIKGNDNLVAVHERSQLL
KLPGETESKDLRAIREERQRTLRQLRTQLAYLRLLVRCGSEDVGRRERSWAKLIEQPVDAAN
HMTPDWREAFENELQKLKSLHGICSDKEWMDAVYESVRRVWRHMGKQVRDWRKDVRSGERPK
IRGYAKDVVGGNSIEQIEYLERQYKFLKSWSFFGKVSGQVIRAEKGSRFAITLREHIDHAKE
DRLKKLADRIIMEALGYVYALDERGKGKWVAKYPPCQLILLEELSEYQFNNDRPPSENNQLM
QWSHRGVFQELINQAQVHDLLVGTMYAAFSSRFDARTGAPGIRCRRVPARCTQEHNPEPFPW
WLNKFVVEHTLDACPLRADDLIPTGEGEIFVSPFSAEEGDFHQIHADLNAAQNLQQRLWSDF
DISQIRLRCDWGEVDGELVLIPRLTGKRTADSYSNKVFYTNTGVTYYERERGKKRRKVFAQE
KLSEEEAELLVEADEAREKSVVLMRDPSGIINRGNWTRQKEFWSMV NQRIEGYLVKQIRSR
VPLQDSACENTGDI.

[0248] BhCas12b (Bacillus hisashii) NCBI Reference Sequence: WP 095142515

MAPKKKRKVGIHGVPAAATRSFILKIEPNEEVKKGLWKTHEVLNHGIAYYMNILKLIRQEAI
YEHHEQDPKNPKKVSKAEIQAELWDFVLKMQKCNSFTHEVDKDEVFNILRELYEELVPSSVE
KKGEANQLSNKFLYPLVDPNSQSGKGTASSGRKPRWYNLKIAGDPSWEEEKKKWEEDKKKDP
LAKILGKLAEYGLIPLFIPYTDSNEPIVKEIKWMEKSRNQSVRRLDKDMFIQALERFLSWES
WNLKVKEEYEKVEKEYKTLEERIKEDIQALKALEQYEKERQEQLLRDTLNTNEYRLSKRGLR
GWREIIQKWLKMDENEPSEKYLEVFKDYQRKHPREAGDYSVYEFLSKKENHFIWRNHPEYPY
LYATFCEIDKKKKDAKQQATFTLADPINHPLWVRFEERSGSNLNKYRILTEQLHTEKLKKKL
TVQLDRLIYPTESGGWEEKGKVDIVLLPSRQFYNQIFLDIEEKGKHAFTYKDESIKFPLKGT
LGGARVQFDRDHLRRYPHKVESGNVGRIYFNMTVNIEPTESPVSKSLKIHRDDFPKVVNFKP
KELTEWIKDSKGKKLKSGIESLEIGLRVMSIDLGQRQAAAASIFEVVDQKPDIEGKLFFPIK
GTELYAVHRASFNIKLPGETLVKSREVLRKAREDNLKLMNQKLNFLRNVLHFQQFEDITERE
KRVTKWISRQENSDVPLVYQDELIQIRELMYKPYKDWVAFLKQLHKRLEVEIGKEVKHWRKS
LSDGRKGLYGISLKNIDEIDRTRKFLLRWSLRPTEPGEVRRLEPGQRFAIDQLNHLNALKED
RLKKMANTIIMHALGYCYDVRKKKWQAKNPACQIILFEDLSNYNPYEERSRFENSKLMKWSR
REIPRQVALQGEIYGLQVGEVGAQFSSRFHAKTGSPGIRCSVVTKEKLQDNRFFKNLQREGR
LTLDKIAVLKEGDLYPDKGGEKFISLSKDRKCVTTHADINAAQNLQKRFWTRTHGFYKVYCK
AYQVDGQTVYIPESKDQKQKIIEEFGEGYFILKDGVYEWVNAGKLKIKKGSSKQSSSELVDS
DILKDSFDLASELKGEKLMLYRDPSGNVFPSDKWMAAGVFFGKLERILISKLTNQYSISTIE
DDSSKQSMKRPAATKKAGQAKKKK

[0249] In some embodiments, the Cas12b is BvCas12B, which is a variant of BhCas12b and comprises the following changes relative to BhCas12B: S893R, K846R, and E837G. BvCas12b (Bacillus sp. V3-13) NCBI Reference Sequence: WP 101661451.1

MAIRSIKLKMKTNSGTDSIYLRKALWRTHQLINEGIAYYMNLLTLYRQEAIGDKTKEAYQAE
LINIIRNQQRNNGSSEEHGSDQEILALLRQLYELIIPSSIGESGDANQLGNKFLYPLVDPNS
QSGKGTSNAGRKPRWKRLKEEGNPDWELEKKKDEERKAKDPTVKIFDNLNKYGLLPLFPLFT
NIQKDIEWLPLGKRQSVRKWDKDMFIQAIERLLSWESWNRRVADEYKQLKEKTESYYKEHLT
GGEEWIEKIRKFEKERNMELEKNAFAPNDGYFITSRQIRGWDRVYEKWSKLPESASPEELWK
VVAEQQNKMSEGFGDPKVFSFLANRENRDIWRGHSERIYHIAAYNGLQKKLSRTKEQATFTL
PDAIEHPLWIRYESPGGTNLNLFKLEEKQKKNYYVTLSKIIWPSEEKWIEKENIEIPLAPSI
QFNRQIKLKQHVKGKQEISFSDYSSRISLDGVLGGSRIQFNRKYIKNHKELLGEGDIGPVFF
NLVVDVAPLQETRNGRLQSPIGKALKVISSDFSKVIDYKPKELMDWMNTGSASNSFGVASLL
EGMRVMSIDMGQRTSASVSIFEWWKELPKDQEQKLFYSINDTELFAIHKRSFLLNLPGEWWT
KNNKQQRQERRKKRQFVRSQIRMLANVLRLETKKTPDERKKAIHKLMEIVQSYDSWTASQKE
VWEKELNLLTNMAAFNDEIWKESLVELHHRIEPYVGQIVSKWRKGLSEGRKNLAGISMWNID
ELEDTRRLLISWSKRSRTPGEANRIETDEPFGSSLLQHIQNVKDDRLKQMANLIIMTALGFK
YDKEEKDRYKRWKETYPACQIILFENLNRYLFNLDRSRRENSRLMKWAHRSIPRTVSMQGEM
FGLQVGDVRSEYSSRFHAKTGAPGIRCHALTEEDLKAGSNTLKRLIEDGFINESELAYLKKG
DIIPSQGGELFVTLSKRYKKDSDNNELTVIHADINAAQNLQKRFWQQNSEVYRVPCQLARMG
EDKLYIPKSQTETIKKYFGKGSFVKNNTEQEVYKWEKSEKMKIKTDTTFDLQDLDGFEDISK
TIELAQEQQKKYLTMFRDPSGYFFNNETWRPQKEYWSIVNNIIKSCLKKKILSNKVEL

[0250] In some embodiments, the nucleic acid programmable DNA binding protein (napDNAbp) of any of the fusion proteins provided herein may be a Cas12j/CasΦ protein. Cas12j/CasΦ is described in Pausch et al., “CRISPR-CasΦ from huge phages is a hypercompact genome editor,” Science, 17 Jul. 2020, Vol. 369, Issue 6501, pp. 333-337, which is incorporated herein by reference in its entirety. In some embodiments, the napDNAbp comprises an amino acid sequence that is at least 85%, at least 90%, at least 91%, at least 92%, at least 93%, at least 94%, at least 95%, at least 96%, at least 97%, at least 98%, at least 99%, or at ease 99.5% identical to a naturally-occurring Cas12j/CasΦ protein. In some embodiments, the napDNAbp is a naturally-occurring Cas12j/CasΦ protein. In some embodiments, the napDNAbp is a nuclease inactive (“dead”) Cas12j/CasΦ protein. It should be appreciated that Cas12j/CasΦ from other species may also be used in accordance with the present disclosure.

[0251] Exemplary Cas12j/CasΦ amino acid sequences follow:

>CasΦ-1
MADTPTLFTQFLRHHLPGQRFRKDILKQAGRILANKGEDATIAFLRGKSEESPPDFQPPVKC
PIIACSRPLTEWPIYQASVAIQGYVYGQSLAEFEASDPGCSKDGLLGWFDKTGVCTDYFSVQ
GLNLIFQNARKRYIGVQTKVTNRNEKRHKKLKRINAKRIAEGLPELTSDEPESALDETGHLI
DPPGLNTNIYCYQQVSPKPLALSEVNQLPTAYAGYSTSGDDPIQPMVTKDRLSISKGQPGYI
PEHQRALLSQKKHRRMRGYGLKARALLVIVRIQDDWAVIDLRSLLRNAYWRRIVQTKEPSTI
TKLLKLVTGDPVLDATRMVATFTYKPGIVQVRSAKCLKNKQGSKLFSERYLNETVSVTSIDL
GSNNLVAVATYRLVNGNTPELLQRFTLPSHLVKDFERYKQAHDTLEDSIQKTAVASLPQGQQ
TEIRMWSMYGFREAQERVCQELGLADGSIPWNVMTATSTILTDLFLARGGDPKKCMFTSEPK
KKKNSKQVLYKIRDRAWAKMYRTLLSKETREAWNKALWGLKRGSPDYARLSKRKEELARRCV
NYTISTAEKRAQCGRTIVALEDLNIGFFHGRGKQEPGWVGLFTRKKENRWLMQALHKAFLEL
AHHRGYHVIEVNPAYTSQTCPVCRHCDPDNRDQHNREAFHCIGCGFRGNADLDVATHNIAMV
AITGESLKRARGSVASKTPQPLAAE*
>CasΦ-2
MPKPAVESEFSKVLKKHFPGERFRSSYMKRGGKILAAQGEEAVVAYLQGKSEEEPPNFQPPA
KCHVVTKSRDFAEWPIMKASEAIQRYIYALSTTERAACKPGKSSESHAAWFAATGVSNHGYS
HVQGLNLIFDHTLGRYDGVLKKVQLRNEKARARLESINASRADEGLPEIKAEEEEVATNETG
HLLQPPGINPSFYVYQTISPQAYRPRDEIVLPPEYAGYVRDPNAPIPLGVVRNRCDIQKGCP
GYIPEWQREAGTAISPKTGKAVTVPGLSPKKNKRMRRYWRSEKEKAQDALLVTVRIGTDWVV
IDVRGLLRNARWRTIAPKDISLNALLDLFTGDPVIDVRRNIVTFTYTLDACGTYARKWTLKG
KQTKATLDKLTATQTVALVAIDLGQTNPISAGISRVTQENGALQCEPLDRFTLPDDLLKDIS
AYRIAWDRNEEELRARSVEALPEAQQAEVRALDGVSKETARTQLCADFGLDPKRLPWDKMSS
NTTFISEALLSNSVSRDQVFFTPAPKKGAKKKAPVEVMRKDRTWARAYKPRLSVEAQKLKNE
ALWALKRTSPEYLKLSRRKEELCRRSINYVIEKTRRRTQCQIVIPVIEDLNVRFFHGSGKRL
PGWDNFFTAKKENRWFIQGLHKAFSDLRTHRSFYVFEVRPERTSITCPKCGHCEVGNRDGEA
FQCLSCGKTCNADLDVATHNLTQVALTGKTMPKREEPRDAQGTAPARKTKKASKSKAPPAER
EDQTPAQEPSQTS
>CasΦ-3
MEKEITELTKIRREFPNKKFSSTDMKKAGKLLKAEGPDAVRDFLNSCQEIIGDFKPPVKTNI
VSISRPFEEWPVSMVGRAIQEYYFSLTKEELESVHPGTSSEDHKSFFNITGLSNYNYTSVQG
LNLIFKNAKAIYDGTLVKANNKNKKLEKKFNEINHKRSLEGLPIITPDFEEPFDENGHLNNP
PGINRNIYGYQGCAAKVFVPSKHKMVSLPKEYEGYNRDPNLSLAGFRNRLEIPEGEPGHVPW
FQRMDIPEGQIGHVNKIQRFNFVHGKNSGKVKFSDKTGRVKRYHHSKYKDATKPYKFLEESK
KVSALDSILAIITIGDDWVVFDIRGLYRNVFYRELAQKGLTAVQLLDLFTGDPVIDPKKGVV
TFSYKEGVVPVFSQKIVPRFKSRDTLEKLTSQGPVALLSVDLGQNEPVAARVCSLKNINDKI
TLDNSCRISFLDDYKKQIKDYRDSLDELEIKIRLEAINSLETNQQVEIRDLDVFSADRAKAN
TVDMFDIDPNLISWDSMSDARVSTQISDLYLKNGGDESRVYFEINNKRIKRSDYNISQLVRP
KLSDSTRKNLNDSIWKLKRTSEEYLKLSKRKLELSRAVVNYTIRQSKLLSGINDIVIILEDL
DVKKKFNGRGIRDIGWDNFFSSRKENRWFIPAFHKAFSELSSNRGLCVIEVNPAWTSATCPD
CGFCSKENRDGINFTCRKCGVSYHADIDVATLNIARVAVLGKPMSGPADRERLGDTKKPRVA
RSRKTMKRKDISNSTVEAMVTA*
>CasΦ-4
MYSLEMADLKSEPSLLAKLLRDRFPGKYWLPKYWKLAEKKRLTGGEEAACEYMADKQLDSPP
PNFRPPARCVILAKSRPFEDWPVHRVASKAQSFVIGLSEQGFAALRAAPPSTADARRDWLRS
HGASEDDLMALEAQLLETIMGNAISLHGGVLKKIDNANVKAAKRLSGRNEARLNKGLQELPP
EQEGSAYGADGLLVNPPGLNLNIYCRKSCCPKPVKNTARFVGHYPGYLRDSDSILISGTMDR
LTIIEGMPGHIPAWQREQGLVKPGGRRRRLSGSESNMRQKVDPSTGPRRSTRSGTVNRSNQR
TGRNGDPLLVEIRMKEDWVLLDARGLLRNLRWRESKRGLSCDHEDLSLSGLLALFSGDPVID
PVRNEVVFLYGEGIIPVRSTKPVGTRQSKKLLERQASMGPLTLISCDLGQTNLIAGRASAIS
LTHGSLGVRSSVRIELDPEIIKSFERLRKDADRLETEILTAAKETLSDEQRGEVNSHEKDSP
QTAKASLCRELGLHPPSLPWGQMGPSTTFIADMLISHGRDDDAFLSHGEFPTLEKRKKFDKR
FCLESRPLLSSETRKALNESLWEVKRTSSEYARLSQRKKEMARRAVNFVVEISRRKTGLSNV
IVNIEDLNVRIFHGGGKQAPGWDGFFRPKSENRWFIQAIHKAFSDLAAHHGIPVIESDPQRT
SMTCPECGHCDSKNRNGVRFLCKGCGASMDADFDAACRNLERVALTGKPMPKPSTSCERLLS
ATTGKVCSDHSLSHDAIEKAS*
>CasΦ-5
MSSLPTPLELLKQKHADLFKGLQFSSKDNKMAGKVLKKDGEEAALAFLSERGVSRGELPNFR
PPAKTLVVAQSRPFEEFPIYRVSEAIQLYVYSLSVKELETVPSGSSTKKEHQRFFQDSSVPD
FGYTSVQGLNKIFGLARGIYLGVITRGENQLQKAKSKHEALNKKRRASGEAETEFDPTPYEY
MTPERKLAKPPGVNHSIMCYVDISVDEFDFRNPDGIVLPSEYAGYCREINTAIEKGTVDRLG
HLKGGPGYIPGHQRKESTTEGPKINFRKGRIRRSYTALYAKRDSRRVRQGKLALPSYRHHMM
RLNSNAESAILAVIFFGKDWVVFDLRGLLRNVRWRNLFVDGSTPSTLLGMFGDPVIDPKRGV
VAFCYKEQIVPVVSKSITKMVKAPELLNKLYLKSEDPLVLVAIDLGQTNPVGVGVYRVMNAS
LDYEVVTRFALESELLREIESYRQRTNAFEAQIRAETFDAMTSEEQEEITRVRAFSASKAKE
NVCHRFGMPVDAVDWATMGSNTIHIAKWVMRHGDPSLVEVLEYRKDNEIKLDKNGVPKKVKL
TDKRIANLTSIRLRFSQETSKHYNDTMWELRRKHPVYQKLSKSKADFSRRVVNSIIRRVNHL
VPRARIVFIIEDLKNLGKVFHGSGKRELGWDSYFEPKSENRWFIQVLHKAFSETGKHKGYYI
IECWPNWTSCTCPKCSCCDSENRHGEVFRCLACGYTCNTDFGTAPDNLVKIATTGKGLPGPK
KRCKGSSKGKNPKIARSSETGVSVTESGAPKVKKSSPTQTSQSSSQSAP*
>CasΦ-6
MNKIEKEKTPLAKLMNENFAGLREPFAIIKQAGKKLLKEGELKTIEYMTGKGSIEPLPNFKP
PVKCLIVAKRRDLKYFPICKASCEIQSYVYSLNYKDFMDYFSTPMTSQKQHEEFFKKSGLNI
EYQNVAGLNLIFNNVKNTYNGVILKVKNRNEKLKKKAIKNNYEFEEIKTFNDDGCLINKPGI
NNVIYCFQSISPKILKNITHLPKEYNDYDCSVDRNIIQKYVSRLDIPESQPGHVPEWQRKLP
EFNNTNNPRRRRKWYSNGRNISKGYSVDQVNQAKIEDSLLAQIKIGEDWIILDIRGLLRDLN
RRELISYKNKLTIKDVLGFFSDYPIIDIKKNLVTFCYKEGVIQVVSQKSIGNKKSKQLLEKL
IENKPIALVSIDLGQTNPVSVKISKLNKINNKISIESFTYRFLNEEILKEIEKYRKDYDKLE
LKLINEA
>CasΦ-7
MSNTAVSTREHMSNKTTPPSPLSLLLRAHFPGLKFESQDYKIAGKKLRDGGPEAVISYLTGK
GQAKLKDVKPPAKAFVIAQSRPFIEWDLVRVSRQIQEKIFGIPATKGRPKQDGLSETAFNEA
VASLEVDGKSKLNEETRAAFYEVLGLDAPSLHAQAQNALIKSAISIREGVLKKVENRNEKNL
SKTKRRKEAGEEATFVEEKAHDERGYLIHPPGVNQTIPGYQAVVIKSCPSDFIGLPSGCLAK
ESAEALTDYLPHDRMTIPKGQPGYVPEWQHPLLNRRKNRRRRDWYSASLNKPKATCSKRSGT
PNRKNSRTDQIQSGRFKGAIPVLMRFQDEWVIIDIRGLLRNARYRKLLKEKSTIPDLLSLFT
GDPSIDMRQGVCTFIYKAGQACSAKMVKTKNAPEILSELTKSGPVVLVSIDLGQTNPIAAKV
SRVTQLSDGQLSHETLLRELLSNDSSDGKEIARYRVASDRLRDKLANLAVERLSPEHKSEIL
RAKNDTPALCKARVCAALGLNPEMIAWDKMTPYTEFLATAYLEKGGDRKVATLKPKNRPEML
RRDIKFKGTEGVRIEVSPEAAEAYREAQWDLQRTSPEYLRLSTWKQELTKRILNQLRHKAAK
SSQCEVVVMAFEDLNIKMMHGNGKWADGGWDAFFIKKRENRWFMQAFHKSLTELGAHKGVPT
IEVTPHRTSITCTKCGHCDKANRDGERFACQKCGFVAHADLEIATDNIERVALTGKPMPKPE
SERSGDAKKSVGARKAAFKPEEDAEAAE*
>CasΦ-8
MIKPTVSQFLTPGFKLIRNHSRTAGLKLKNEGEEACKKFVRENEIPKDECPNFQGGPAIANI
lAKSREFTEWEIYQSSLAIQEVIFTLPKDKLPEPILKEEWRAQWLSEHGLDTVPYKEAAGLN
LIIKNAVNTYKGVQVKVDNKNKNNLAKINRKNEIAKLNGEQEISFEEIKAFDDKGYLLQKPS
PNKSIYCYQSVSPKPFITSKYHNVNLPEEYIGYYRKSNEPIVSPYQFDRLRIPIGEPGYVPK
WQYTFLSKKENKRRKLSKRIKNVSPILGIICIKKDWCVFDMRGLLRTNHWKKYHKPTDSIND
LFDYFTGDPVIDTKANVVRFRYKMENGIVNYKPVREKKGKELLENICDQNGSCKLATVDVGQ
NNPVAIGLFELKKVNGELTKTLISRHPTPIDFCNKITAYRERYDKLESSIKLDAIKQLTSEQ
KIEVDNYNNNFTPQNTKQIVCSKLNINPNDLPWDKMISGTHFISEKAQVSNKSEIYFTSTDK
GKTKDVMKSDYKWFQDYKPKLSKEVRDALSDIEWRLRRESLEFNKLSKSREQDARQLANWIS
SMCDVIGIENLVKKNNFFGGSGKREPGWDNFYKPKKENRWWINAIHKALTELSQNKGKRVIL
LPAMRTSITCPKCKYCDSKNRNGEKFNCLKCGIELNADIDVATENLATVAITAQSMPKPTCE
RSGDAKKPVRARKAKAPEFHDKLAPSYTVVLREAV*
>CasΦ-9
MRSSREIGDKILMRQPAEKTAFQVFRQEVIGTQKLSGGDAKTAGRLYKQGKMEAAREWLLKG
ARDDVPPNFQPPAKCLVVAVSHPFEEWDISKTNHDVQAYIYAQPLQAEGHLNGLSEKWEDTS
ADQHKLWFEKTGVPDRGLPVQAINKIAKAAVNRAFGVVRKVENRNEKRRSRDNRIAEHNREN
GLTEVVREAPEVATNADGFLLHPPGIDPSILSYASVSPVPYNSSKHSFVRLPEEYQAYNVEP
DAPIPQFVVEDRFAIPPGQPGYVPEWQRLKCSTNKHRRMRQWSNQDYKPKAGRRAKPLEFQA
HLTRERAKGALLVVMRIKEDWVVFDVRGLLRNVEWRKVLSEEAREKLTLKGLLDLFTGDPVI
DTKRGIVTFLYKAEITKILSKRTVKTKNARDLLLRLTEPGEDGLRREVGLVAVDLGQTHPIA
AAIYRIGRTSAGALESTVLHRQGLREDQKEKLKEYRKRHTALDSRLRKEAFETLSVEQQKEI
VTVSGSGAQITKDKVCNYLGVDPSTLPWEKMGSYTHFISDDFLRRGGDPNIVHFDRQPKKGK
VSKKSQRIKRSDSQWVGRMRPRLSQETAKARMEADWAAQNENEEYKRLARSKQELARWCVNT
LLQNTRCITQCDEIVVVIEDLNVKSLHGKGAREPGWDNFFTPKTENRWFIQILHKTFSELPK
HRGEHVIEGCPLRTSITCPACSYCDKNSRNGEKFVCVACGATFHADFEVATYNLVRLATTGM
PMPKSLERQGGGEKAGGARKARKKAKQVEKIVVQANANVTMNGASLHSP*
>CasΦ-10
MDMLDTETNYATETPAQQQDYSPKPPKKAQRAPKGFSKKARPEKKPPKPITLFTQKHFSGVR
FLKRVIRDASKILKLSESRTITFLEQAIERDGSAPPDVTPPVHNTIMAVTRPFEEWPEVILS
KALQKHCYALTKKIKIKTWPKKGPGKKCLAAWSARTKIPLIPGQVQATNGLFDRIGSIYDGV
EKKVTNRNANKKLEYDEAIKEGRNPAVPEYETAYNIDGTLINKPGYNPNLYITQSRTPRLIT
EADRPLVEKILWQMVEKKTQSRNQARRARLEKAAHLQGLPVPKFVPEKVDRSQKIEIRIIDP
LDKIEPYMPQDRMAIKASQDGHVPYWQRPFLSKRRNRRVRAGWGKQVSSIQAWLTGALLVIV
RLGNEAFLADIRGALRNAQWRKLLKPDATYQSLFNLFTGDPVVNTRTNHLTMAYREGVVNIV
KSRSFKGRQTREHLLTLLGQGKTVAGVSFDLGQKHAAGLLAAHFGLGEDGNPVFTPIQACFL
PQRYLDSLTNYRNRYDALTLDMRRQSLLALTPAQQQEFADAQRDPGGQAKRACCLKLNLNPD
EIRWDLVSGISTMISDLYIERGGDPRDVHQQVETKPKGKRKSEIRILKIRDGKWAYDFRPKI
ADETRKAQREQLWKLQKASSEFERLSRYKINIARAIANWALQWGRELSGCDIVIPVLEDLNV
GSKFFDGKGKWLLGWDNRFTPKKENRWFIKVLHKAVAELAPHRGVPVYEVMPHRTSMTCPAC
HYCHPTNREGDRFECQSCHVVKNTDRDVAPYNILRVAVEGKTLDRWQAEKKPQAEPDRPMIL
IDNQES*

The asterisk (*) in the sequences above denotes a STOP codon. Alternatively, CasΦ-1 is also termed Cas12j ortholog 1. Thus, CasΦ-1-CasΦ-10 may also be referred to as Cas12j orthologs 1-10, respectively.

[0252] The Cas9 nuclease has two functional endonuclease domains: RuvC and HNH. Cas9 undergoes a conformational change upon target binding that positions the nuclease domains to cleave opposite strands of the target DNA. The end result of Cas9-mediated DNA cleavage is a double-strand break (DSB) within the target DNA (˜3-4 nucleotides upstream of the PAM sequence). The resulting DSB is then repaired by one of two general repair pathways: (1) the efficient but error-prone non-homologous end joining (NHEJ) pathway; or (2) the less efficient but high-fidelity homology directed repair (HDR) pathway.

[0253] The “efficiency” of non-homologous end joining (NHEJ) and/or homology directed repair (HDR) can be calculated by any convenient method. For example, in some cases, efficiency can be expressed in terms of percentage of successful HDR. For example, a surveyor nuclease assay can be used to generate cleavage products and the ratio of products to substrate can be used to calculate the percentage. For example, a surveyor nuclease enzyme can be used that directly cleaves DNA containing a newly integrated restriction sequence as the result of successful HDR. More cleaved substrate indicates a greater percent HDR (a greater efficiency of HDR). As an illustrative example, a fraction (percentage) of HDR can be calculated using the following equation [(cleavage products)/(substrate plus cleavage products)] (e.g., (b+c)/(a+b+c), where “a” is the band intensity of DNA substrate and “b” and “c” are the cleavage products).

[0254] In some cases, efficiency can be expressed in terms of percentage of successful NHEJ. For example, a T7 endonuclease I assay can be used to generate cleavage products and the ratio of products to substrate can be used to calculate the percentage NHEJ. T7 endonuclease I cleaves mismatched heteroduplex DNA which arises from hybridization of wild-type and mutant DNA strands (NHEJ generates small random insertions or deletions (indels) at the site of the original break). More cleavage indicates a greater percent NHEJ (a greater efficiency of NHEJ). As an illustrative example, a fraction (percentage) of NHEJ can be calculated using the following equation: (1−(1−(b+c)/(a+b+c))^{1/2})×100, where “a” is the band intensity of DNA substrate and “b” and “c” are the cleavage products (Ran et. al., Cell. 2013 Sep. 12; 154(6):1380-9; and Ran et al., Nat Protoc. 2013 November; 8(11): 2281-2308).

[0255] The NHEJ repair pathway is the most active repair mechanism, and it frequently causes small nucleotide insertions or deletions (indels) at the DSB site. The randomness of NHEJ-mediated DSB repair has important practical implications, because a population of cells expressing Cas9 and a gRNA or a guide polynucleotide can result in a diverse array of mutations. In most cases, NHEJ gives rise to small indels in the target DNA that result in amino acid deletions, insertions, or frameshift mutations leading to premature stop codons within the open reading frame (ORF) of the targeted gene. The ideal end result is a loss-of-function mutation within the targeted gene.

[0256] While NHEJ-mediated DSB repair often disrupts the open reading frame of the gene, homology directed repair (HDR) can be used to generate specific nucleotide changes ranging from a single nucleotide change to large insertions like the addition of a fluorophore or tag. In order to utilize HDR for gene editing, a DNA repair template containing the desired sequence can be delivered into the cell type of interest with the gRNA(s) and Cas9 or Cas9 nickase. The repair template can contain the desired edit as well as additional homologous sequence immediately upstream and downstream of the target (termed left & right homology arms). The length of each homology arm can be dependent on the size of the change being introduced, with larger insertions requiring longer homology arms. The repair template can be a single-stranded oligonucleotide, double-stranded oligonucleotide, or a double-stranded DNA plasmid. The efficiency of HDR is generally low (<10% of modified alleles) even in cells that express Cas9, gRNA and an exogenous repair template. The efficiency of HDR can be enhanced by synchronizing the cells, since HDR takes place during the S and G2 phases of the cell cycle. Chemically or genetically inhibiting genes involved in NHEJ can also increase HDR frequency.

[0257] In some embodiments, Cas9 is a modified Cas9. A given gRNA targeting sequence can have additional sites throughout the genome where partial homology exists. These sites are called off-targets and need to be considered when designing a gRNA. In addition to optimizing gRNA design, CRISPR specificity can also be increased through modifications to Cas9. Cas9 generates double-strand breaks (DSBs) through the combined activity of two nuclease domains, RuvC and HNH. Cas9 nickase, a D10A mutant of SpCas9, retains one nuclease domain and generates a DNA nick rather than a DSB. The nickase system can also be combined with HDR-mediated gene editing for specific gene edits.

[0258] In some cases, Cas9 is a variant Cas9 protein. A variant Cas9 polypeptide has an amino acid sequence that is different by one amino acid (e.g., has a deletion, insertion, substitution, fusion) when compared to the amino acid sequence of a wild type Cas9 protein. In some instances, the variant Cas9 polypeptide has an amino acid change (e.g., deletion, insertion, or substitution) that reduces the nuclease activity of the Cas9 polypeptide. For example, in some instances, the variant Cas9 polypeptide has less than 50%, less than 40%, less than 30%, less than 20%, less than 10%, less than 5%, or less than 1% of the nuclease activity of the corresponding wild-type Cas9 protein. In some cases, the variant Cas9 protein has no substantial nuclease activity. When a subject Cas9 protein is a variant Cas9 protein that has no substantial nuclease activity, it can be referred to as “dCas9.”

[0259] In some cases, a variant Cas9 protein has reduced nuclease activity. For example, a variant Cas9 protein exhibits less than about 20%, less than about 15%, less than about 10%, less than about 5%, less than about 1%, or less than about 0.1%, of the endonuclease activity of a wild-type Cas9 protein, e.g., a wild-type Cas9 protein.

[0260] In some cases, a variant Cas9 protein can cleave the complementary strand of a guide target sequence but has reduced ability to cleave the non-complementary strand of a double stranded guide target sequence. For example, the variant Cas9 protein can have a mutation (amino acid substitution) that reduces the function of the RuvC domain. As a non-limiting example, in some embodiments, a variant Cas9 protein has a D10A (aspartate to alanine at amino acid position 10) and can therefore cleave the complementary strand of a double stranded guide target sequence but has reduced ability to cleave the non-complementary strand of a double stranded guide target sequence (thus resulting in a single strand break (SSB) instead of a double strand break (DSB) when the variant Cas9 protein cleaves a double stranded target nucleic acid) (see, for example, Jinek et al., Science. 2012 Aug. 17; 337(6096):816-21).

[0261] In some cases, a variant Cas9 protein can cleave the non-complementary strand of a double stranded guide target sequence but has reduced ability to cleave the complementary strand of the guide target sequence. For example, the variant Cas9 protein can have a mutation (amino acid substitution) that reduces the function of the HNH domain (RuvC/HNH/RuvC domain motifs). As a non-limiting example, in some embodiments, the variant Cas9 protein has an H840A (histidine to alanine at amino acid position 840) mutation and can therefore cleave the non-complementary strand of the guide target sequence but has reduced ability to cleave the complementary strand of the guide target sequence (thus resulting in a SSB instead of a DSB when the variant Cas9 protein cleaves a double stranded guide target sequence). Such a Cas9 protein has a reduced ability to cleave a guide target sequence (e.g., a single stranded guide target sequence) but retains the ability to bind a guide target sequence (e.g., a single stranded guide target sequence).

[0262] In some cases, a variant Cas9 protein has a reduced ability to cleave both the complementary and the non-complementary strands of a double stranded target DNA. As a non-limiting example, in some cases, the variant Cas9 protein harbors both the D10A and the H840A mutations such that the polypeptide has a reduced ability to cleave both the complementary and the non-complementary strands of a double stranded target DNA. Such a Cas9 protein has a reduced ability to cleave a target DNA (e.g., a single stranded target DNA) but retains the ability to bind a target DNA (e.g., a single stranded target DNA).

[0263] As another non-limiting example, in some cases, the variant Cas9 protein harbors W476A and W1126A mutations such that the polypeptide has a reduced ability to cleave a target DNA. Such a Cas9 protein has a reduced ability to cleave a target DNA (e.g., a single stranded target DNA) but retains the ability to bind a target DNA (e.g., a single stranded target DNA).

[0264] As another non-limiting example, in some cases, the variant Cas9 protein harbors P475A, W476A, N477A, D1125A, W1126A, and D1127A mutations such that the polypeptide has a reduced ability to cleave a target DNA. Such a Cas9 protein has a reduced ability to cleave a target DNA (e.g., a single stranded target DNA) but retains the ability to bind a target DNA (e.g., a single stranded target DNA).

[0265] As another non-limiting example, in some cases, the variant Cas9 protein harbors H840A, W476A, and W1126A, mutations such that the polypeptide has a reduced ability to cleave a target DNA. Such a Cas9 protein has a reduced ability to cleave a target DNA (e.g., a single stranded target DNA) but retains the ability to bind a target DNA (e.g., a single stranded target DNA). As another non-limiting example, in some cases, the variant Cas9 protein harbors H840A, D10A, W476A, and W1126A, mutations such that the polypeptide has a reduced ability to cleave a target DNA. Such a Cas9 protein has a reduced ability to cleave a target DNA (e.g., a single stranded target DNA) but retains the ability to bind a target DNA (e.g., a single stranded target DNA). In some embodiments, the variant Cas9 has restored catalytic His residue at position 840 in the Cas9 HNH domain (A840H).

[0266] As another non-limiting example, in some cases, the variant Cas9 protein harbors, H840A, P475A, W476A, N477A, D1125A, W1126A, and D1127A mutations such that the polypeptide has a reduced ability to cleave a target DNA. Such a Cas9 protein has a reduced ability to cleave a target DNA (e.g., a single stranded target DNA) but retains the ability to bind a target DNA (e.g., a single stranded target DNA). As another non-limiting example, in some cases, the variant Cas9 protein harbors D10A, H840A, P475A, W476A, N477A, D1125A, W1126A, and D1127A mutations such that the polypeptide has a reduced ability to cleave a target DNA. Such a Cas9 protein has a reduced ability to cleave a target DNA (e.g., a single stranded target DNA) but retains the ability to bind a target DNA (e.g., a single stranded target DNA). In some cases, when a variant Cas9 protein harbors W476A and W1126A mutations or when the variant Cas9 protein harbors P475A, W476A, N477A, D1125A, W1126A, and D1127A mutations, the variant Cas9 protein does not bind efficiently to a PAM sequence. Thus, in some such cases, when such a variant Cas9 protein is used in a method of binding, the method does not require a PAM sequence. In other words, in some cases, when such a variant Cas9 protein is used in a method of binding, the method can include a guide RNA, but the method can be performed in the absence of a PAM sequence (and the specificity of binding is therefore provided by the targeting segment of the guide RNA). Other residues can be mutated to achieve the above effects (i.e., inactivate one or the other nuclease portions). As non-limiting examples, residues D10, G12, G17, E762, H840, N854, N863, H982, H983, A984, D986, and/or A987 can be altered (i.e., substituted). Also, mutations other than alanine substitutions are suitable.

[0267] In some embodiments, a variant Cas9 protein that has reduced catalytic activity (e.g., when a Cas9 protein has a D10, G12, G17, E762, H840, N854, N863, H982, H983, A984, D986, and/or a A987 mutation, e.g., D10A, G12A, G17A, E762A, H840A, N854A, N863A, H982A, H983A, A984A, and/or D986A), the variant Cas9 protein can still bind to target DNA in a site-specific manner (because it is still guided to a target DNA sequence by a guide RNA) as long as it retains the ability to interact with the guide RNA.

[0268] In some embodiments, the variant Cas protein can be spCas9, spCas9-VRQR, spCas9-VRER, xCas9 (sp), saCas9, saCas9-KKH, spCas9-MQKSER, spCas9-LRKIQK, or spCas9-LRVSQL.

[0269] In some embodiments, a modified SpCas9 including amino acid substitutions D1135M, S1136Q, G1218K, E1219F, A1322R, D1332A, R1335E, and T1337R (SpCas9-MQKFRAER) and having specificity for the altered PAM 5′-NGC-3′ is used.

[0270] Alternatives to S. pyogenes Cas9 can include RNA-guided endonucleases from the Cpf1 family that display cleavage activity in mammalian cells. CRISPR from Prevotella and Francisella 1 (CRISPR/Cpf1) is a DNA-editing technology analogous to the CRISPR/Cas9 system. Cpf1 is an RNA-guided endonuclease of a class II CRISPR/Cas system. This acquired immune mechanism is found in Prevotella and Francisella bacteria. Cpf1 genes are associated with the CRISPR locus, coding for an endonuclease that use a guide RNA to find and cleave viral DNA. Cpf1 is a smaller and simpler endonuclease than Cas9, overcoming some of the CRISPR/Cas9 system limitations. Unlike Cas9 nucleases, the result of Cpf1-mediated DNA cleavage is a double-strand break with a short 3′ overhang. Cpf1's staggered cleavage pattern can open up the possibility of directional gene transfer, analogous to traditional restriction enzyme cloning, which can increase the efficiency of gene editing. Like the Cas9 variants and orthologues described above, Cpf1 can also expand the number of sites that can be targeted by CRISPR to AT-rich regions or AT-rich genomes that lack the NGG PAM sites favored by SpCas9. The Cpf1 locus contains a mixed alpha/beta domain, a RuvC-I followed by a helical region, a RuvC-II and a zinc finger-like domain. The Cpf1 protein has a RuvC-like endonuclease domain that is similar to the RuvC domain of Cas9. Furthermore, Cpf1 does not have a HNH endonuclease domain, and the N-terminal of Cpf1 does not have the alpha-helical recognition lobe of Cas9. Cpf1 CRISPR-Cas domain architecture shows that Cpf1 is functionally unique, being classified as Class 2, type V CRISPR system. The Cpf1 loci encode Cas1, Cas2 and Cas4 proteins more similar to types I and III than from type II systems. Functional Cpf1 doesn't need the trans-activating CRISPR RNA (tracrRNA), therefore, only CRISPR (crRNA) is required. This benefits genome editing because Cpf1 is not only smaller than Cas9, but also it has a smaller sgRNA molecule (proximately half as many nucleotides as Cas9). The Cpf1-crRNA complex cleaves target DNA or RNA by identification of a protospacer adjacent motif 5′-YTN-3′ in contrast to the G-rich PAM targeted by Cas9. After identification of PAM, Cpf1 introduces a sticky-end-like DNA double-stranded break of 4 or 5 nucleotides overhang.

[0271] Some aspects of the disclosure provide fusion proteins comprising domains that act as nucleic acid programmable DNA binding proteins, which may be used to guide a protein, such as a base editor, to a specific nucleic acid (e.g., DNA or RNA) sequence. In particular embodiments, a fusion protein comprises a nucleic acid programmable DNA binding protein domain and a deaminase domain. DNA binding proteins include, without limitation, Cas9 (e.g., dCas9 and nCas9), Cas12a/Cpf1, Cas12b/C2c1, Cas12c/C2c3, Cas12d/CasY, Cas12e/CasX, Cas12g, Cas12h, Cas12i, and Cas12j/CasΦ. One example of a programmable polynucleotide-binding protein that has different PAM specificity than Cas9 is Clustered Regularly Interspaced Short Palindromic Repeats from Prevotella and Francisella1 (Cpf1). Similar to Cas9, Cpf1 is also a class 2 CRISPR effector. It has been shown that Cpf1 mediates robust DNA interference with features distinct from Cas9. Cpf1 is a single RNA-guided endonuclease lacking tracrRNA, and it utilizes a T-rich protospacer-adjacent motif (TTN, TTTN, or YTN). Moreover, Cpf1 cleaves DNA via a staggered DNA double-stranded break. Out of 16 Cpf1-family proteins, two enzymes from Acidaminococcus and Lachnospiraceae are shown to have efficient genome-editing activity in human cells. Cpf1 proteins are known in the art and have been described previously, for example Yamano et al., “Crystal structure of Cpf1 in complex with guide RNA and target DNA.” Cell (165) 2016, p. 949-962; the entire contents of which is hereby incorporated by reference.

[0272] Also useful in the present compositions and methods are nuclease-inactive Cpf1 (dCpf1) variants that may be used as a guide nucleotide sequence-programmable polynucleotide-binding protein domain. The Cpf1 protein has a RuvC-like endonuclease domain that is similar to the RuvC domain of Cas9 but does not have a HNH endonuclease domain, and the N-terminal of Cpf1 does not have the alfa-helical recognition lobe of Cas9. It was shown in Zetsche et al., Cell, 163, 759-771, 2015 (which is incorporated herein by reference) that, the RuvC-like domain of Cpf1 is responsible for cleaving both DNA strands and inactivation of the RuvC-like domain inactivates Cpf1 nuclease activity. For example, mutations corresponding to D917A, E1006A, or D1255A in Francisella novicida Cpf1 inactivate Cpf1 nuclease activity. In some embodiments, the dCpf1 of the present disclosure comprises mutations corresponding to D917A, E1006A, D1255A, D917A/E1006A, D917A/D1255A, E1006A/D1255A, or D917A/E1006A/D1255A. It is to be understood that any mutations, e.g., substitution mutations, deletions, or insertions that inactivate the RuvC domain of Cpf1, may be used in accordance with the present disclosure.

[0273] In some embodiments, the nucleic acid programmable nucleotide binding protein of any of the fusion proteins provided herein may be a Cpf1 protein. In some embodiments, the Cpf1 protein is a Cpf1 nickase (nCpf1). In some embodiments, the Cpf1 protein is a nuclease inactive Cpf1 (dCpf1). In some embodiments, the Cpf1, the nCpf1, or the dCpf1 comprises an amino acid sequence that is at least 85%, at least 90%, at least 91%, at least 92%, at least 93%, at least 94%, at least 95%, at least 96%, at least 97%, at least 98%, at least 99%, or at least 99.5% identical to a Cpf1 sequence disclosed herein. In some embodiments, the dCpf1 comprises an amino acid sequence that is at least 85%, at least 90%, at least 91%, at least 92%, at least 93%, at least 94%, at least 95%, at least 96%, at least 97%, at least 98%, at least 99%, or at ease 99.5% identical to a Cpf1 sequence disclosed herein, and comprises mutations corresponding to D917A, E1006A, D1255A, D917A/E1006A, D917A/D1255A, E1006A/D1255A, or D917A/E1006A/D1255A. It should be appreciated that Cpf1 from other bacterial species may also be used in accordance with the present disclosure.

[0274] The amino acid sequence of wild type Francisella novicida Cpf1 follows. D917, E1006, and D1255 are bolded and underlined.

MSIYQEFVNKYSLSKTLRFELIPQGKTLENIKARGLILDDEKRAKDYKK
AKQIIDKYHQEFIEEILSSVCISEDLLQNYSDVYFKLKKSDDDNLQKDF
KSAKDTIKKQISEYIKDSEKFKNLFNQNLIDAKKGQESDLILWLKQSKD
NGIELFKANSDITDIDEALEIIKSFKGWTTYFKGFHENRKNVYSSNDIP
TSIIYRIVDDNLPKFLENKAKYESLKDKAPEAINYEQIKKDLAEELTFD
IDYKTSEVNQRVFSLDEVFEIANFNNYLNQSGITKFNTIIGGKFVNGEN
TKRKGINEYINLYSQQINDKTLKKYKMSVLFKQILSDTESKSFVIDKLE
DDSDVVTTMQSFYEQIAAFKTVEEKSIKETLSLLFDDLKAQKLDLSKIY
FKNDKSLTDLSQQVFDDYSVIGTAVLEYITQQIAPKNLDNPSKKEQELI
AKKTEKAKYLSLETIKLALEEFNKHRDIDKQCRFEEILANFAAIPMIFD
EIAQNKDNLAQISIKYQNQGKKDLLQASAEDDVKAIKDLLDQTNNLLHK
LKIFHISQSEDKANILDKDEHFYLVFEECYFELANIVPLYNKIRNYITQ
KPYSDEKFKLNFENSTLANGWDKNKEPDNTAILFIKDDKYYLGVMNKKN
NKIFDDKAIKENKGEGYKKIVYKLLPGANKMLPKVFFSAKSIKFYNPSE
DILRIRNHSTHTKNGSPQKGYEKFEFNIEDCRKFIDFYKQSISKHPEWK
DFGFRFSDTQRYNSIDEFYREVENQGYKLTFENISESYIDSVVNQGKLY
LFQIYNKDFSAYSKGRPNLHTLYWKALFDERNLQDVVYKLNGEAELFYR
KQSIPKKITHPAKEAIANKNKDNPKKESVFEYDLIKDKRFTEDKFFFHC
PITINFKSSGANKFNDEINLLLKEKANDVHILSI [symbol] RGERHLAYYTLVDG
KGNIIKQDTFNIIGNDRMKTNYHDKLAAIEKDRDSARKDWKKINNIKEM
KEGYLSQVVHEIAKLVIEYNAIVVF [symbol] DLNFGFKRGRFKVEKQVYQKLEK
MLIEKLNYLVFKDNEFDKTGGVLRAYQLTAPFETFKKMGKQTGIIYYVP
AGFTSKICPVTGFVNQLYPKYESVSKSQEFFSKFDKICYNLDKGYFEFS
FDYKNFGDKAAKGKWTIASFGSRLINFRNSDKNHNWDTREVYPTKELEK
LLKDYSIEYGHGECIKAAICGESDKKFFAKLTSVLNTILQMRNSKTGTE
LDYLISPVADVNGNFFDSRQAPKNMPQDA [symbol] ANGAYHIGLKGLMLLGRIK
NNQEGKKLNLVIKNEEYFEFVQNRNN.

[0275] The amino acid sequence of Francisella novicida Cpf1 D917A follows. (A917, E1006, and D1255 are bolded and underlined).

MSIYQEFVNKYSLSKTLRFELIPQGKTLENIKARGLILDDEKRAKDYKK
AKQIIDKYHQEFIEEILSSVCISEDLLQNYSDVYFKLKKSDDDNLQKDF
KSAKDTIKKQISEYIKDSEKFKNLFNQNLIDAKKGQESDLILWLKQSKD
NGIELFKANSDITDIDEALEIIKSFKGWTTYFKGFHENRKNVYSSNDIP
TSIIYRIVDDNLPKFLENKAKYESLKDKAPEAINYEQIKKDLAEELTFD
IDYKTSEVNQRVFSLDEVFEIANFNNYLNQSGITKFNTIIGGKFVNGEN
TKRKGINEYINLYSQQINDKTLKKYKMSVLFKQILSDTESKSFVIDKLE
DDSDVVTTMQSFYEQIAAFKTVEEKSIKETLSLLFDDLKAQKLDLSKIY
FKNDKSLTDLSQQVFDDYSVIGTAVLEYITQQIAPKNLDNPSKKEQELI
AKKTEKAKYLSLETIKLALEEFNKHRDIDKQCRFEEILANFAAIPMIFD
EIAQNKDNLAQISIKYQNQGKKDLLQASAEDDVKAIKDLLDQTNNLLHK
LKIFHISQSEDKANILDKDEHFYLVFEECYFELANIVPLYNKIRNYITQ
KPYSDEKFKLNFENSTLANGWDKNKEPDNTAILFIKDDKYYLGVMNKKN
NKIFDDKAIKENKGEGYKKIVYKLLPGANKMLPKVFFSAKSIKFYNPSE
DILRIRNHSTHTKNGSPQKGYEKFEFNIEDCRKFIDFYKQSISKHPEWK
DFGFRFSDTQRYNSIDEFYREVENQGYKLTFENISESYIDSVVNQGKLY
LFQIYNKDFSAYSKGRPNLHTLYWKALFDERNLQDVVYKLNGEAELFYR
KQSIPKKITHPAKEAIANKNKDNPKKESVFEYDLIKDKRFTEDKFFFHC
PITINFKSSGANKFNDEINLLLKEKANDVHILSI [symbol] RGERHLAYYTLVDG
KGNIIKQDTFNIIGNDRMKTNYHDKLAAIEKDRDSARKDWKKINNIKEM
KEGYLSQVVHEIAKLVIEYNAIVVF [symbol] DLNFGFKRGRFKVEKQVYQKLEK
MLIEKLNYLVFKDNEFDKTGGVLRAYQLTAPFETFKKMGKQTGIIYYVP
AGFTSKICPVTGFVNQLYPKYESVSKSQEFFSKFDKICYNLDKGYFEFS
FDYKNFGDKAAKGKWTIASFGSRLINFRNSDKNHNWDTREVYPTKELEK
LLKDYSIEYGHGECIKAAICGESDKKFFAKLTSVLNTILQMRNSKTGTE
LDYLISPVADVNGNFFDSRQAPKNMPQDA [symbol] ANGAYHIGLKGLMLLGRIK
NNQEGKKLNLVIKNEEYFEFVQNRNN.

[0276] The amino acid sequence of Francisella novicida Cpf1 E1006A follows. (D917, A1006, and D1255 are bolded and underlined).

MSIYQEFVNKYSLSKTLRFELIPQGKTLENIKARGLILDDEKRAKDYKK
AKQIIDKYHQEFIEEILSSVCISEDLLQNYSDVYFKLKKSDDDNLQKDF
KSAKDTIKKQISEYIKDSEKFKNLFNQNLIDAKKGQESDLILWLKQSKD
NGIELFKANSDITDIDEALEIIKSFKGWTTYFKGFHENRKNVYSSNDIP
TSIIYRIVDDNLPKFLENKAKYESLKDKAPEAINYEQIKKDLAEELTFD
IDYKTSEVNQRVFSLDEVFEIANFNNYLNQSGITKFNTIIGGKFVNGEN
TKRKGINEYINLYSQQINDKTLKKYKMSVLFKQILSDTESKSFVIDKLE
DDSDVVTTMQSFYEQIAAFKTVEEKSIKETLSLLFDDLKAQKLDLSKIY
FKNDKSLTDLSQQVFDDYSVIGTAVLEYITQQIAPKNLDNPSKKEQELI
AKKTEKAKYLSLETIKLALEEFNKHRDIDKQCRFEEILANFAAIPMIFD
EIAQNKDNLAQISIKYQNQGKKDLLQASAEDDVKAIKDLLDQTNNLLHK
LKIFHISQSEDKANILDKDEHFYLVFEECYFELANIVPLYNKIRNYITQ
KPYSDEKFKLNFENSTLANGWDKNKEPDNTAILFIKDDKYYLGVMNKKN
NKIFDDKAIKENKGEGYKKIVYKLLPGANKMLPKVFFSAKSIKFYNPSE
DILRIRNHSTHTKNGSPQKGYEKFEFNIEDCRKFIDFYKQSISKHPEWK
DFGFRFSDTQRYNSIDEFYREVENQGYKLTFENISESYIDSVVNQGKLY
LFQIYNKDFSAYSKGRPNLHTLYWKALFDERNLQDVVYKLNGEAELFYR
KQSIPKKITHPAKEAIANKNKDNPKKESVFEYDLIKDKRFTEDKFFFHC
PITINFKSSGANKFNDEINLLLKEKANDVHILSI [symbol] RGERHLAYYTLVDG
KGNIIKQDTFNIIGNDRMKTNYHDKLAAIEKDRDSARKDWKKINNIKEM
KEGYLSQVVHEIAKLVIEYNAIVVF [symbol] DLNFGFKRGRFKVEKQVYQKLEK
MLIEKLNYLVFKDNEFDKTGGVLRAYQLTAPFETFKKMGKQTGIIYYVP
AGFTSKICPVTGFVNQLYPKYESVSKSQEFFSKFDKICYNLDKGYFEFS
FDYKNFGDKAAKGKWTIASFGSRLINFRNSDKNHNWDTREVYPTKELEK
LLKDYSIEYGHGECIKAAICGESDKKFFAKLTSVLNTILQMRNSKTGTE
LDYLISPVADVNGNFFDSRQAPKNMPQDA [symbol] ANGAYHIGLKGLMLLGRIK
NNQEGKKLNLVIKNEEYFEFVQNRNN.

[0277] The amino acid sequence of Francisella novicida Cpf1 D1255A follows. (D917, E1006, and A1255 mutation positions are bolded and underlined).

MSIYQEFVNKYSLSKTLRFELIPQGKTLENIKARGLILDDEKRAKDYKK
AKQIIDKYHQEFIEEILSSVCISEDLLQNYSDVYFKLKKSDDDNLQKDF
KSAKDTIKKQISEYIKDSEKFKNLFNQNLIDAKKGQESDLILWLKQSKD
NGIELFKANSDITDIDEALEIIKSFKGWTTYFKGFHENRKNVYSSNDIP
TSIIYRIVDDNLPKFLENKAKYESLKDKAPEAINYEQIKKDLAEELTFD
IDYKTSEVNQRVFSLDEVFEIANFNNYLNQSGITKFNTIIGGKFVNGEN
TKRKGINEYINLYSQQINDKTLKKYKMSVLFKQILSDTESKSFVIDKLE
DDSDVVTTMQSFYEQIAAFKTVEEKSIKETLSLLFDDLKAQKLDLSKIY
FKNDKSLTDLSQQVFDDYSVIGTAVLEYITQQIAPKNLDNPSKKEQELI
AKKTEKAKYLSLETIKLALEEFNKHRDIDKQCRFEEILANFAAIPMIFD
EIAQNKDNLAQISIKYQNQGKKDLLQASAEDDVKAIKDLLDQTNNLLHK
LKIFHISQSEDKANILDKDEHFYLVFEECYFELANIVPLYNKIRNYITQ
KPYSDEKFKLNFENSTLANGWDKNKEPDNTAILFIKDDKYYLGVMNKKN
NKIFDDKAIKENKGEGYKKIVYKLLPGANKMLPKVFFSAKSIKFYNPSE
DILRIRNHSTHTKNGSPQKGYEKFEFNIEDCRKFIDFYKQSISKHPEWK
DFGFRFSDTQRYNSIDEFYREVENQGYKLTFENISESYIDSVVNQGKLY
LFQIYNKDFSAYSKGRPNLHTLYWKALFDERNLQDVVYKLNGEAELFYR
KQSIPKKITHPAKEAIANKNKDNPKKESVFEYDLIKDKRFTEDKFFFHC
PITINFKSSGANKFNDEINLLLKEKANDVHILSI [symbol] RGERHLAYYTLVDG
KGNIIKQDTFNIIGNDRMKTNYHDKLAAIEKDRDSARKDWKKINNIKEM
KEGYLSQVVHEIAKLVIEYNAIVVF [symbol] DLNFGFKRGRFKVEKQVYQKLEK
MLIEKLNYLVFKDNEFDKTGGVLRAYQLTAPFETFKKMGKQTGIIYYVP
AGFTSKICPVTGFVNQLYPKYESVSKSQEFFSKFDKICYNLDKGYFEFS
FDYKNFGDKAAKGKWTIASFGSRLINFRNSDKNHNWDTREVYPTKELEK
LLKDYSIEYGHGECIKAAICGESDKKFFAKLTSVLNTILQMRNSKTGTE
LDYLISPVADVNGNFFDSRQAPKNMPQDA [symbol] ANGAYHIGLKGLMLLGRIK
NNQEGKKLNLVIKNEEYFEFVQNRNN

[0278] The amino acid sequence of Francisella novicida Cpf1 D917A/E1006A follows. (A917, A1006, and D1255 are bolded and underlined).

MSIYQEFVNKYSLSKTLRFELIPQGKTLENIKARGLILDDEKRAKDYKK
AKQIIDKYHQEFIEEILSSVCISEDLLQNYSDVYFKLKKSDDDNLQKDF
KSAKDTIKKQISEYIKDSEKFKNLFNQNLIDAKKGQESDLILWLKQSKD
NGIELFKANSDITDIDEALEIIKSFKGWTTYFKGFHENRKNVYSSNDIP
TSIIYRIVDDNLPKFLENKAKYESLKDKAPEAINYEQIKKDLAEELTFD
IDYKTSEVNQRVFSLDEVFEIANFNNYLNQSGITKFNTIIGGKFVNGEN
TKRKGINEYINLYSQQINDKTLKKYKMSVLFKQILSDTESKSFVIDKLE
DDSDVVTTMQSFYEQIAAFKTVEEKSIKETLSLLFDDLKAQKLDLSKIY
FKNDKSLTDLSQQVFDDYSVIGTAVLEYITQQIAPKNLDNPSKKEQELI
AKKTEKAKYLSLETIKLALEEFNKHRDIDKQCRFEEILANFAAIPMIFD
EIAQNKDNLAQISIKYQNQGKKDLLQASAEDDVKAIKDLLDQTNNLLHK
LKIFHISQSEDKANILDKDEHFYLVFEECYFELANIVPLYNKIRNYITQ
KPYSDEKFKLNFENSTLANGWDKNKEPDNTAILFIKDDKYYLGVMNKKN
NKIFDDKAIKENKGEGYKKIVYKLLPGANKMLPKVFFSAKSIKFYNPSE
DILRIRNHSTHTKNGSPQKGYEKFEFNIEDCRKFIDFYKQSISKHPEWK
DFGFRFSDTQRYNSIDEFYREVENQGYKLTFENISESYIDSVVNQGKLY
LFQIYNKDFSAYSKGRPNLHTLYWKALFDERNLQDVVYKLNGEAELFYR
KQSIPKKITHPAKEAIANKNKDNPKKESVFEYDLIKDKRFTEDKFFFHC
PITINFKSSGANKFNDEINLLLKEKANDVHILSI [symbol] RGERHLAYYTLVDG
KGNIIKQDTFNIIGNDRMKTNYHDKLAAIEKDRDSARKDWKKINNIKEM
KEGYLSQVVHEIAKLVIEYNAIVVF [symbol] DLNFGFKRGRFKVEKQVYQKLEK
MLIEKLNYLVFKDNEFDKTGGVLRAYQLTAPFETEKKMGKQTGIIYYVP
AGETSKICPVTGEVNQLYPKYESVSKSQEEFSKEDKICYNLDKGYFEFS
FDYKNFGDKAAKGKWTIASFGSRLINFRNSDKNHNWDTREVYPTKELEK
LLKDYSIEYGHGECIKAAICGESDKKFFAKLTSVLNTILQMRNSKTGTE
LDYLISPVADVNGNFFDSRQAPKNMPQDA [symbol] ANGAYHIGLKGLMLLGRIK
NNQEGKKLNLVIKNEEYFEFVQNRNN.

[0279] The amino acid sequence of Francisella novicida Cpf1 D917A/D1255A follows. (A917, E1006, and A1255 are bolded and underlined).

MSIYQEFVNKYSLSKTLRFELIPQGKTLENIKARGLILDDEKRAKDYKK
AKQIIDKYHQEFIEEILSSVCISEDLLQNYSDVYFKLKKSDDDNLQKDF
KSAKDTIKKQISEYIKDSEKFKNLFNQNLIDAKKGQESDLILWLKQSKD
NGIELFKANSDITDIDEALEIIKSFKGWTTYFKGFHENRKNVYSSNDIP
TSIIYRIVDDNLPKFLENKAKYESLKDKAPEAINYEQIKKDLAEELTFD
IDYKTSEVNQRVFSLDEVFEIANFNNYLNQSGITKFNTIIGGKFVNGEN
TKRKGINEYINLYSQQINDKTLKKYKMSVLFKQILSDTESKSFVIDKLE
DDSDVVTTMQSFYEQIAAFKTVEEKSIKETLSLLFDDLKAQKLDLSKIY
FKNDKSLTDLSQQVFDDYSVIGTAVLEYITQQIAPKNLDNPSKKEQELI
AKKTEKAKYLSLETIKLALEEFNKHRDIDKQCRFEEILANFAAIPMIFD
EIAQNKDNLAQISIKYQNQGKKDLLQASAEDDVKAIKDLLDQTNNLLHK
LKIFHISQSEDKANILDKDEHFYLVFEECYFELANIVPLYNKIRNYITQ
KPYSDEKFKLNFENSTLANGWDKNKEPDNTAILFIKDDKYYLGVMNKKN
NKIFDDKAIKENKGEGYKKIVYKLLPGANKMLPKVFFSAKSIKFYNPSE
DILRIRNHSTHTKNGSPQKGYEKFEFNIEDCRKFIDFYKQSISKHPEWK
DFGFRFSDTQRYNSIDEFYREVENQGYKLTFENISESYIDSVVNQGKLY
LFQIYNKDFSAYSKGRPNLHTLYWKALFDERNLQDVVYKLNGEAELFYR
KQSIPKKITHPAKEAIANKNKDNPKKESVFEYDLIKDKRFTEDKFFFHC
PITINFKSSGANKFNDEINLLLKEKANDVHILSI [symbol] RGERHLAYYTLVDG
KGNIIKQDTFNIIGNDRMKTNYHDKLAAIEKDRDSARKDWKKINNIKEM
KEGYLSQVVHEIAKLVIEYNAIVVF [symbol] DLNFGFKRGRFKVEKQVYQKLEK
MLIEKLNYLVFKDNEFDKTGGVLRAYQLTAPFETFKKMGKQTGIIYYVP
AGFTSKICPVTGFVNQLYPKYESVSKSQEFFSKFDKICYNLDKGYFEFS
FDYKNFGDKAAKGKWTIASFGSRLINFRNSDKNHNWDTREVYPTKELEK
LLKDYSIEYGHGECIKAAICGESDKKFFAKLTSVLNTILQMRNSKTGTE
LDYLISPVADVNGNFFDSRQAPKNMPQDA [symbol] ANGAYHIGLKGLMLLGRIK
NNQEGKKLNLVIKNEEYFEFVQNRNN.

[0280] The amino acid sequence of Francisella novicida Cpf1 E1006A/D1255A follows. (D917, A1006, and A1255 are bolded and underlined).

MSIYQEFVNKYSLSKTLRFELIPQGKTLENIKARGLILDDEKRAKDYKK
AKQIIDKYHQEFIEEILSSVCISEDLLQNYSDVYFKLKKSDDDNLQKDF
KSAKDTIKKQISEYIKDSEKFKNLFNQNLIDAKKGQESDLILWLKQSKD
NGIELFKANSDITDIDEALEIIKSFKGWTTYFKGFHENRKNVYSSNDIP
TSIIYRIVDDNLPKFLENKAKYESLKDKAPEAINYEQIKKDLAEELTFD
IDYKTSEVNQRVFSLDEVFEIANFNNYLNQSGITKFNTIIGGKFVNGEN
TKRKGINEYINLYSQQINDKTLKKYKMSVLFKQILSDTESKSEVIDKLE
DDSDVVTTMQSFYEQIAAFKTVEEKSIKETLSLLFDDLKAQKLDLSKIY
FKNDKSLTDLSQQVFDDYSVIGTAVLEYITQQIAPKNLDNPSKKEQELI
AKKTEKAKYLSLETIKLALEEFNKHRDIDKQCRFEEILANFAAIPMIFD
EIAQNKDNLAQISIKYQNQGKKDLLQASAEDDVKAIKDLLDQTNNLLHK
LKIFHISQSEDKANILDKDEHFYLVFEECYFELANIVPLYNKIRNYITQ
KPYSDEKFKLNFENSTLANGWDKNKEPDNTAILFIKDDKYYLGVMNKKN
NKIFDDKAIKENKGEGYKKIVYKLLPGANKMLPKVFFSAKSIKFYNPSE
DILRIRNHSTHTKNGSPQKGYEKFEFNIEDCRKFIDFYKQSISKHPEWK
DFGFRFSDTQRYNSIDEFYREVENQGYKLTFENISESYIDSVVNQGKLY
LFQIYNKDFSAYSKGRPNLHTLYWKALFDERNLQDVVYKLNGEAELFYR
KQSIPKKITHPAKEAIANKNKDNPKKESVFEYDLIKDKRFTEDKFFFHC
PITINFKSSGANKFNDEINLLLKEKANDVHILSI [symbol] RGERHLAYYTLVDG
KGNIIKQDTFNIIGNDRMKTNYHDKLAAIEKDRDSARKDWKKINNIKEM
KEGYLSQVVHEIAKLVIEYNAIVVF [symbol] DLNFGFKRGRFKVEKQVYQKLEK
MLIEKLNYLVFKDNEFDKTGGVLRAYQLTAPFETFKKMGKQTGIIYYVP
AGFTSKICPVTGFVNQLYPKYESVSKSQEFFSKFDKICYNLDKGYFEFS
FDYKNFGDKAAKGKWTIASFGSRLINFRNSDKNHNWDTREVYPTKELEK
LLKDYSIEYGHGECIKAAICGESDKKFFAKLTSVLNTILQMRNSKTGTE
LDYLISPVADVNGNFFDSRQAPKNMPQDA [symbol] ANGAYHIGLKGLMLLGRIK
NNQEGKKLNLVIKNEEYFEFVQNRNN.

[0281] The amino acid sequence of Francisella novicida Cpf1 D917A/E1006A/D1255A follows (A917, A1006, and A1255 are bolded and underlined)

MSIYQEFVNKYSLSKTLRFELIPQGKTLENIKARGLILDDEKRAKDYKK
AKQIIDKYHQEFIEEILSSVCISEDLLQNYSDVYFKLKKSDDDNLQKDF
KSAKDTIKKQISEYIKDSEKFKNLFNQNLIDAKKGQESDLILWLKQSKD
NGIELFKANSDITDIDEALEIIKSFKGWTTYFKGFHENRKNVYSSNDIP
TSIIYRIVDDNLPKFLENKAKYESLKDKAPEAINYEQIKKDLAEELTFD
IDYKTSEVNQRVFSLDEVFEIANFNNYLNQSGITKFNTIIGGKFVNGEN
TKRKGINEYINLYSQQINDKTLKKYKMSVLFKQILSDTESKSFVIDKLE
DDSDVVTTMQSFYEQIAAFKTVEEKSIKETLSLLFDDLKAQKLDLSKIY
FKNDKSLTDLSQQVFDDYSVIGTAVLEYITQQIAPKNLDNPSKKEQELI
AKKTEKAKYLSLETIKLALEEFNKHRDIDKQCRFEEILANFAAIPMIFD
EIAQNKDNLAQISIKYQNQGKKDLLQASAEDDVKAIKDLLDQTNNLLHK
LKIFHISQSEDKANILDKDEHFYLVFEECYFELANIVPLYNKIRNYITQ
KPYSDEKFKLNFENSTLANGWDKNKEPDNTAILFIKDDKYYLGVMNKKN
NKIFDDKAIKENKGEGYKKIVYKLLPGANKMLPKVFFSAKSIKFYNPSE
DILRIRNHSTHTKNGSPQKGYEKFEFNIEDCRKFIDFYKQSISKHPEWK
DFGFRFSDTQRYNSIDEFYREVENQGYKLTFENISESYIDSVVNQGKLY
LFQIYNKDFSAYSKGRPNLHTLYWKALFDERNLQDVVYKLNGEAELFYR
KQSIPKKITHPAKEAIANKNKDNPKKESVFEYDLIKDKRFTEDKFFFHC
PITINFKSSGANKFNDEINLLLKEKANDVHILSI [symbol] RGERHLAYYTLVDG
KGNIIKQDTFNIIGNDRMKTNYHDKLAAIEKDRDSARKDWKKINNIKEM
KEGYLSQVVHEIAKLVIEYNAIVVF [symbol] DLNFGFKRGRFKVEKQVYQKLEK
MLIEKLNYLVFKDNEFDKTGGVLRAYQLTAPFETFKKMGKQTGIIYYVP
AGFTSKICPVTGFVNQLYPKYESVSKSQEFFSKFDKICYNLDKGYFEFS
FDYKNFGDKAAKGKWTIASFGSRLINFRNSDKNHNWDTREVYPTKELEK
LLKDYSIEYGHGECIKAAICGESDKKFFAKLTSVLNTILQMRNSKTGTE
LDYLISPVADVNGNFFDSRQAPKNMPQDA [symbol] ANGAYHIGLKGLMLLGRIK
NNQEGKKLNLVIKNEEYFEFVQNRNN.

[0282] In some embodiments, one of the Cas9 domains present in the fusion protein may be replaced with a guide nucleotide sequence-programmable DNA-binding protein domain that has no requirements for a PAM sequence.

[0283] In some embodiments, the Cas domain is a Cas9 domain from Staphylococcus aureus (SaCas9). In some embodiments, the SaCas9 domain is a nuclease active SaCas9, a nuclease inactive SaCas9 (SaCas9d), or a SaCas9 nickase (SaCas9n). In some embodiments, the SaCas9 domain comprises a N579A mutation, or a corresponding mutation in any of the amino acid sequences provided herein.

[0284] In some embodiments, the SaCas9 domain, the SaCas9d domain, or the SaCas9n domain can bind to a nucleic acid sequence having a non-canonical PAM. In some embodiments, the SaCas9 domain, the SaCas9d domain, or the SaCas9n domain can bind to a nucleic acid sequence having a NNGRRT or a NNGRRT PAM sequence. In some embodiments, the SaCas9 domain comprises one or more of a E781X, a N967X, and a R1014X mutation, or a corresponding mutation in any of the amino acid sequences provided herein, wherein X is any amino acid. In some embodiments, the SaCas9 domain comprises one or more of a E781K, a N967K, and a R1014H mutation, or one or more corresponding mutation in any of the amino acid sequences provided herein. In some embodiments, the SaCas9 domain comprises a E781K, a N967K, or a R1014H mutation, or corresponding mutations in any of the amino acid sequences provided herein.

[0285] The amino acid sequence of an exemplary SaCas9 is as follows:

MKRNYILGLDIGITSVGYGIIDYETRDVIDAGVRLFKEANVENNEGRRS
KRGARRLKRRRRHRIQRVKKLLFDYNLLTDHSELSGINPYEARVKGLSQ
KLSEEEFSAALLHLAKRRGVHNVNEVEEDTGNELSTKEQISRNSKALEE
KYVAELQLERLKKDGEVRGSINRFKTSDYVKEAKQLLKVQKAYHQLDQS
FIDTYIDLLETRRTYYEGPGEGSPFGWKDIKEWYEMLMGHCTYFPEELR
SVKYAYNADLYNALNDLNNLVITRDENEKLEYYEKFQIIENVFKQKKKP
TLKQIAKEILVNEEDIKGYRVTSTGKPEFTNLKVYHDIKDITARKEIIE
NAELLDQIAKILTIYQSSEDIQEELTNLNSELTQEEIEQISNLKGYTGT
HNLSLKAINLILDELWHTNDNQIAIFNRLKLVPKKVDLSQQKEIPTTLV
DDFILSPVVKRSFIQSIKVINAIIKKYGLPNDIIIELAREKNSKDAQKM
INEMQKRNRQTNERIEEIIRTTGKENAKYLIEKIKLHDMQEGKCLYSLE
AIPLEDLLNNPFNYEVDHIIPRSVSFDNSENNKVLVKQEE [symbol] SKKGNRTP
FQYLSSSDSKISYETEKKHILNLAKGKGRISKTKKEYLLEERDINRFSV
QKDFINRNLVDTRYATRGLMNLLRSYFRVNNLDVKVKSINGGFTSFLRR
KWKFKKERNKGYKHHAEDALIIANADFIFKEWKKLDKAKKVMENQMFEE
KQAESMPEIETEQEYKEIFITPHQIKHIKDFKDYKYSHRVDKKPNRELI
NDTLYSTRKDDKGNTLIVNNLNGLYDKDNDKLKKLINKSPEKLLMYHHD
PQTYQKLKLIMEQYGDEKNPLYKYYEETGNYLTKYSKKDNGPVIKKIKY
YGNKLNAHLDITDDYPNSRNKVVKLSLKPYRFDVYLDNGVYKFVTVKNL
DVIKKENYYEVNSKCYEEAKKLKKISNQAEFIASFYNNDLIKINGELYR
VIGVNNDLLNRIEVNMIDITYREYLENMNDKRPPRIIKTIASKTQSIKK
YSTDILGNLYEVKSKKHPQIIKKG.

In this sequence, residue N579, which is underlined and in bold, may be mutated (e.g., to a A579) to yield a SaCas9 nickase.

[0286] The amino acid sequence of an exemplary SaCas9n is as follows:

KRNYILGLDIGITSVGYGIIDYETRDVIDAGVRLFKEANVENNEGRRSK
RGARRLKRRRRHRIQRVKKLLFDYNLLTDHSELSGINPYEARVKGLSQK
LSEEEFSAALLHLAKRRGVHNVNEVEEDTGNELSTKEQISRNSKALEEK
YVAELQLERLKKDGEVRGSINRFKTSDYVKEAKQLLKVQKAYHQLDQSF
IDTYIDLLETRRTYYEGPGEGSPFGWKDIKEWYEMLMGHCTYFPEELRS
VKYAYNADLYNALNDLNNLVITRDENEKLEYYEKFQIIENVFKQKKKPT
LKQIAKEILVNEEDIKGYRVTSTGKPEFTNLKVYHDIKDITARKEIIEN
AELLDQIAKILTIYQSSEDIQEELTNLNSELTQEEIEQISNLKGYTGTH
NLSLKAINLILDELWHTNDNQIAIFNRLKLVPKKVDLSQQKEIPTTLVD
DFILSPVVKRSFIQSIKVINAIIKKYGLPNDIIIELAREKNSKDAQKMI
NEMQKRNRQTNERIEEIIRTTGKENAKYLIEKIKLHDMQEGKCLYSLEA
IPLEDLLNNPFNYEVDHIIPRSVSFDNSFNNKVLVKQEE [symbol] SKKGNRTPF
QYLSSSDSKISYETFKKHILNLAKGKGRISKTKKEYLLEERDINRFSVQ
KDFINRNLVDTRYATRGLMNLLRSYFRVNNLDVKVKSINGGFTSFLRRK
WKFKKERNKGYKHHAEDALIIANADFIFKEWKKLDKAKKVMENQMFEEK
QAESMPEIETEQEYKEIFITPHQIKHIKDFKDYKYSHRVDKKPNRELIN
DTLYSTRKDDKGNTLIVNNLNGLYDKDNDKLKKLINKSPEKLLMYHHDP
QTYQKLKLIMEQYGDEKNPLYKYYEETGNYLTKYSKKDNGPVIKKIKYY
GNKLNAHLDITDDYPNSRNKVVKLSLKPYRFDVYLDNGVYKFVTVKNLD
VIKKENYYEVNSKCYEEAKKLKKISNQAEFIASFYNNDLIKINGELYRV
IGVNNDLLNRIEVNMIDITYREYLENMNDKRPPRIIKTIASKTQSIKKY
STDILGNLYEVKSKKHPQIIKKG.

[0287] In this sequence, residue A579, which can be mutated from N579 to yield a SaCas9 nickase, is underlined and in bold.

[0288] The amino acid sequences of an exemplary SaKKH Cas9 is as follows:

KRNYILGLDIGITSVGYGIIDYETRDVIDAGVRLFKEANVENNEGRRSK
RGARRLKRRRRHRIQRVKKLLFDYNLLTDHSELSGINPYEARVKGLSQK
LSEEEFSAALLHLAKRRGVHNVNEVEEDTGNELSTKEQISRNSKALEEK
YVAELQLERLKKDGEVRGSINRFKTSDYVKEAKQLLKVQKAYHQLDQSE
IDTYIDLLETRRTYYEGPGEGSPFGWKDIKEWYEMLMGHCTYFPEELRS
VKYAYNADLYNALNDLNNLVITRDENEKLEYYEKFQIIENVFKQKKKPT
LKQIAKEILVNEEDIKGYRVTSTGKPEFTNLKVYHDIKDITARKEIIEN
AELLDQIAKILTIYQSSEDIQEELTNLNSELTQEEIEQISNLKGYTGTH
NLSLKAINLILDELWHTNDNQIAIFNRLKLVPKKVDLSQQKEIPTTLVD
DFILSPVVKRSFIQSIKVINAIIKKYGLPNDIIIELAREKNSKDAQKMI
NEMQKRNRQTNERIEEIIRTTGKENAKYLIEKIKLHDMQEGKCLYSLEA
IPLEDLLNNPFNYEVDHIIPRSVSFDNSFNNKVLVKQEE [symbol] SKKGNRTPF
QYLSSSDSKISYETFKKHILNLAKGKGRISKTKKEYLLEERDINRFSVQ
KDFINRNLVDTRYATRGLMNLLRSYFRVNNLDVKVKSINGGFTSFLRRK
WKFKKERNKGYKHHAEDALIIANADFIFKEWKKLDKAKKVMENQMFEEK
QAESMPEIETEQEYKEIFITPHQIKHIKDFKDYKYSHRVDKKPNRKLIN
DTLYSTRKDDKGNTLIVNNLNGLYDKDNDKLKKLINKSPEKLLMYHHDP
QTYQKLKLIMEQYGDEKNPLYKYYEETGNYLTKYSKKDNGPVIKKIKYY
GNKLNAHLDITDDYPNSRNKVVKLSLKPYRFDVYLDNGVYKFVTVKNLD
VIKKENYYEVNSKCYEEAKKLKKISNQAEFIASFYKNDLIKINGELYRV
IGVNNDLLNRIEVNMIDITYREYLENMNDKRPPHIIKTIASKTQSIKKY
STDILGNLYEVKSKKHPQIIKKG.

[0289] Residue A579 above, which can be mutated from N579 to yield a SaCas9 nickase, is underlined and in bold. Residues K781, K967, and H1014 above, which can be mutated from E781, N967, and R1014 to yield a SaKKH Cas9 are underlined and in italics.

### High Fidelity Cas9 Domains

[0290] Some aspects of the disclosure provide high fidelity Cas9 domains. In some embodiments, high fidelity Cas9 domains are engineered Cas9 domains comprising one or more mutations that decrease electrostatic interactions between the Cas9 domain and the sugar-phosphate backbone of a DNA, relative to a corresponding wild-type Cas9 domain. High fidelity Cas9 domains that have decreased electrostatic interactions with the sugar-phosphate backbone of DNA can have less off-target effects. In some embodiments, the Cas9 domain (e.g., a wild type Cas9 domain) comprises one or more mutations that decrease the association between the Cas9 domain and the sugar-phosphate backbone of a DNA. In some embodiments, a Cas9 domain comprises one or more mutations that decreases the association between the Cas9 domain and the sugar-phosphate backbone of DNA by at least 1%, at least 2%, at least 3%, at least 4%, at least 5%, at least 10%, at least 15%, at least 20%, at least 25%, at least 30%, at least 35%, at least 40%, at least 45%, at least 50%, at least 55%, at least 60%, at least 65%, or at least 70%.

[0291] In some embodiments, any of the Cas9 fusion proteins provided herein comprise one or more of a N497X, a R661X, a Q695X, and/or a Q926X mutation, or a corresponding mutation in any of the amino acid sequences provided herein, wherein X is any amino acid. In some embodiments, any of the Cas9 fusion proteins provided herein comprise one or more of a N497A, a R661A, a Q695A, and/or a Q926A mutation, or a corresponding mutation in any of the amino acid sequences provided herein. In some embodiments, the Cas9 domain comprises a D10A mutation, or a corresponding mutation in any of the amino acid sequences provided herein. Cas9 domains with high fidelity are known in the art and would be apparent to the skilled artisan. For example, Cas9 domains with high fidelity have been described in Kleinstiver, B. P., et al. “High-fidelity CRISPR-Cas9 nucleases with no detectable genome-wide off-target effects.” Nature 529, 490-495 (2016); and Slaymaker, I. M., et al. “Rationally engineered Cas9 nucleases with improved specificity.” Science 351, 84-88 (2015); the entire contents of each are incorporated herein by reference.

[0292] In some embodiments, the modified Cas9 is a high fidelity Cas9 enzyme. In some embodiments, the high fidelity Cas9 enzyme is SpCas9(K855A), eSpCas9(1.1), SpCas9-HF1, or hyper accurate Cas9 variant (HypaCas9). The modified Cas9 eSpCas9(1.1) contains alanine substitutions that weaken the interactions between the HNH/RuvC groove and the non-target DNA strand, preventing strand separation and cutting at off-target sites. Similarly, SpCas9-HF1 lowers off-target editing through alanine substitutions that disrupt Cas9's interactions with the DNA phosphate backbone. HypaCas9 contains mutations (SpCas9 N692A/M694A/Q695A/H698A) in the REC3 domain that increase Cas9 proofreading and target discrimination. All three high fidelity enzymes generate less off-target editing than wildtype Cas9.

[0293] An exemplary high fidelity Cas9 is provided below.

High Fidelity Cas9 domain mutations relative to Cas9 are shown in bold and underline

MDKKYSIGL [symbol] IGTNSVGWAVITDEYKVPSKKFKVLGNTDRHSIKKNLIG
ALLFDSGETAEATRLKRTARRRYTRRKNRICYLQEIFSNEMAKVDDSFF
HRLEESFLVEEDKKHERHPIFGNIVDEVAYHEKYPTIYHLRKKLVDSTD
KADLRLIYLALAHMIKFRGHFLIEGDLNPDNSDVDKLFIQLVQTYNQLF
EENPINASGVDAKAILSARLSKSRRLENLIAQLPGEKKNGLFGNLIALS
LGLTPNFKSNFDLAEDAKLQLSKDTYDDDLDNLLAQIGDQYADLFLAAK
NLSDAILLSDILRVNTEITKAPLSASMIKRYDEHHQDLTLLKALVRQQL
PEKYKEIFFDQSKNGYAGYIDGGASQEEFYKFIKPILEKMDGTEELLVK
LNREDLLRKQRTFDNGSIPHQIHLGELHAILRRQEDFYPFLKDNREKIE
KILTFRIPYYVGPLARGNSRFAWMTRKSEETITPWNFEEVVDKGASAQS
FIERMT [symbol] FDKNLPNEKVLPKHSLLYEYFTVYNELTKVKYVTEGMRKPAF
LSGEQKKAIVDLLFKTNRKVTVKQLKEDYFKKIECFDSVEISGVEDRFN
ASLGTYHDLLKIIKDKDFLDNEENEDILEDIVLTLTLFEDREMIEERLK
TYAHLFDDKVMKQLKRRRYTGWG [symbol] LSRKLINGIRDKQSGKTILDFLKSD
GFANRNFM [symbol] LIHDDSLTFKEDIQKAQVSGQGDSLHEHIANLAGSPAIKK
GILQTVKVVDELVKVMGRHKPENIVIEMARENQTTQKGQKNSRERMKRI
EEGIKELGSQILKEHPVENTQLQNEKLYLYYLQNGRDMYVDQELDINRL
SDYDVDHIVPQSFLKDDSIDNKVLTRSDKNRGKSDNVPSEEVVKKMKNY
WRQLLNAKLITQRKFDNLTKAERGGLSELDKAGFIKRQLVETR [symbol] ITKHV
AQILDSRMNTKYDENDKLIREVKVITLKSKLVSDFRKDFQFYKVREINN
YHHAHDAYLNAVVGTALIKKYPKLESEFVYGDYKVYDVRKMIAKSEQEI
GKATAKYFFYSNIMNFFKTEITLANGEIRKRPLIETNGETGEIVWDKGR
DFATVRKVLSMPQVNIVKKTEVQTGGFSKESILPKRNSDKLIARKKDWD
PKKYGGFDSPTVAYSVLVVAKVEKGKSKKLKSVKELLGITIMERSSFEK
NPIDFLEAKGYKEVKKDLIIKLPKYSLFELENGRKRMLASAGELQKGNE
LALPSKYVNFLYLASHYEKLKGSPEDNEQKQLFVEQHKHYLDEIIEQIS
EFSKRVILADANLDKVLSAYNKHRDKPIREQAENIIHLFTLTNLGAPAA
FKYFDTTIDRKRYTSTKEVLDATLIHQSITGLYETRIDLSQLGGD.

### Guide Polynucleotides

[0294] In an embodiment, the guide polynucleotide is a guide RNA. An RNA/Cas complex can assist in “guiding” Cas protein to a target DNA. Cas9/crRNA/tracrRNA endonucleolytically cleaves linear or circular dsDNA target complementary to the spacer. The target strand not complementary to crRNA is first cut endonucleolytically, then trimmed 3′-5′ exonucleolytically. In nature, DNA-binding and cleavage typically requires protein and both RNAs. However, single guide RNAs (“sgRNA”, or simply “gNRA”) can be engineered so as to incorporate aspects of both the crRNA and tracrRNA into a single RNA species. See, e.g., Jinek M. et al., Science 337:816-821(2012), the entire contents of which is hereby incorporated by reference. Cas9 recognizes a short motif in the CRISPR repeat sequences (the PAM or protospacer adjacent motif) to help distinguish self versus non-self. Cas9 nuclease sequences and structures are well known to those of skill in the art (see e.g., “Complete genome sequence of an M1 strain of Streptococcus pyogenes.” Ferretti, J. J. et al., Natl. Acad. Sci. U.S.A. 98:4658-4663(2001); “CRISPR RNA maturation by trans-encoded small RNA and host factor RNase III.” Deltcheva E. et al., Nature 471:602-607(2011); and “Programmable dual-RNA-guided DNA endonuclease in adaptive bacterial immunity.” Jinek M. et al, Science 337:816-821(2012), the entire contents of each of which are incorporated herein by reference). Cas9 orthologs have been described in various species, including, but not limited to, S. pyogenes and S. thermophilus. Additional suitable Cas9 nucleases and sequences can be apparent to those of skill in the art based on this disclosure, and such Cas9 nucleases and sequences include Cas9 sequences from the organisms and loci disclosed in Chylinski, Rhun, and Charpentier, “The tracrRNA and Cas9 families of type II CRISPR-Cas immunity systems” (2013) RNA Biology 10:5, 726-737; the entire contents of which are incorporated herein by reference. In some embodiments, a Cas9 nuclease has an inactive (e.g., an inactivated) DNA cleavage domain, that is, the Cas9 is a nickase.

[0295] In some embodiments, the guide polynucleotide is at least one single guide RNA (“sgRNA” or “gNRA”). In some embodiments, the guide polynucleotide is at least one tracrRNA. In some embodiments, the guide polynucleotide does not require PAM sequence to guide the polynucleotide-programmable DNA-binding domain (e.g., Cas9 or Cpf1) to the target nucleotide sequence.

[0296] The polynucleotide programmable nucleotide binding domain (e.g., a CRISPR-derived domain) of the base editors disclosed herein can recognize a target polynucleotide sequence by associating with a guide polynucleotide. A guide polynucleotide (e.g., gRNA) is typically single-stranded and can be programmed to site-specifically bind (i.e., via complementary base pairing) to a target sequence of a polynucleotide, thereby directing a base editor that is in conjunction with the guide nucleic acid to the target sequence. A guide polynucleotide can be DNA. A guide polynucleotide can be RNA. In some cases, the guide polynucleotide comprises natural nucleotides (e.g., adenosine). In some cases, the guide polynucleotide comprises non-natural (or unnatural) nucleotides (e.g., peptide nucleic acid or nucleotide analogs). In some cases, the targeting region of a guide nucleic acid sequence can be at least 15, 16, 17, 18, 19, 20, 21, 22, 23, 24, 25, 26, 27, 28, 29, or 30 nucleotides in length. A targeting region of a guide nucleic acid can be between 10-30 nucleotides in length, or between 15-25 nucleotides in length, or between 15-20 nucleotides in length.

[0297] In some embodiments, a guide polynucleotide comprises two or more individual polynucleotides, which can interact with one another via for example complementary base pairing (e.g., a dual guide polynucleotide). For example, a guide polynucleotide can comprise a CRISPR RNA (crRNA) and a trans-activating CRISPR RNA (tracrRNA). For example, a guide polynucleotide can comprise one or more trans-activating CRISPR RNA (tracrRNA).

[0298] In type II CRISPR systems, targeting of a nucleic acid by a CRISPR protein (e.g., Cas9) typically requires complementary base pairing between a first RNA molecule (crRNA) comprising a sequence that recognizes the target sequence and a second RNA molecule (trRNA) comprising repeat sequences which forms a scaffold region that stabilizes the guide RNA-CRISPR protein complex. Such dual guide RNA systems can be employed as a guide polynucleotide to direct the base editors disclosed herein to a target polynucleotide sequence.

[0299] In some embodiments, the base editor provided herein utilizes a single guide polynucleotide (e.g., gRNA). In some embodiments, the base editor provided herein utilizes a dual guide polynucleotide (e.g., dual gRNAs). In some embodiments, the base editor provided herein utilizes one or more guide polynucleotide (e.g., multiple gRNA). In some embodiments, a single guide polynucleotide is utilized for different base editors described herein. For example, a single guide polynucleotide can be utilized for a cytidine base editor and an adenosine base editor.

[0300] In other embodiments, a guide polynucleotide can comprise both the polynucleotide targeting portion of the nucleic acid and the scaffold portion of the nucleic acid in a single molecule (i.e., a single-molecule guide nucleic acid). For example, a single-molecule guide polynucleotide can be a single guide RNA (sgRNA or gRNA). Herein the term guide polynucleotide sequence contemplates any single, dual or multi-molecule nucleic acid capable of interacting with and directing a base editor to a target polynucleotide sequence.

[0301] Typically, a guide polynucleotide (e.g., crRNA/trRNA complex or a gRNA) comprises a “polynucleotide-targeting segment” that includes a sequence capable of recognizing and binding to a target polynucleotide sequence, and a “protein-binding segment” that stabilizes the guide polynucleotide within a polynucleotide programmable nucleotide binding domain component of a base editor. In some embodiments, the polynucleotide targeting segment of the guide polynucleotide recognizes and binds to a DNA polynucleotide, thereby facilitating the editing of a base in DNA. In other cases, the polynucleotide targeting segment of the guide polynucleotide recognizes and binds to an RNA polynucleotide, thereby facilitating the editing of a base in RNA. Herein a “segment” refers to a section or region of a molecule, e.g., a contiguous stretch of nucleotides in the guide polynucleotide. A segment can also refer to a region/section of a complex such that a segment can comprise regions of more than one molecule. For example, where a guide polynucleotide comprises multiple nucleic acid molecules, the protein-binding segment of can include all or a portion of multiple separate molecules that are for instance hybridized along a region of complementarity. In some embodiments, a protein-binding segment of a DNA-targeting RNA that comprises two separate molecules can comprise (i) base pairs 40-75 of a first RNA molecule that is 100 base pairs in length; and (ii) base pairs 10-25 of a second RNA molecule that is 50 base pairs in length. The definition of “segment,” unless otherwise specifically defined in a particular context, is not limited to a specific number of total base pairs, is not limited to any particular number of base pairs from a given RNA molecule, is not limited to a particular number of separate molecules within a complex, and can include regions of RNA molecules that are of any total length and can include regions with complementarity to other molecules.

[0302] A guide RNA or a guide polynucleotide can comprise two or more RNAs, e.g., CRISPR RNA (crRNA) and transactivating crRNA (tracrRNA). A guide RNA or a guide polynucleotide can sometimes comprise a single-chain RNA, or single guide RNA (sgRNA) formed by fusion of a portion (e.g., a functional portion) of crRNA and tracrRNA. A guide RNA or a guide polynucleotide can also be a dual RNA comprising a crRNA and a tracrRNA. Furthermore, a crRNA can hybridize with a target DNA.

[0303] As discussed above, a guide RNA or a guide polynucleotide can be an expression product. For example, a DNA that encodes a guide RNA can be a vector comprising a sequence coding for the guide RNA. A guide RNA or a guide polynucleotide can be transferred into a cell by transfecting the cell with an isolated guide RNA or plasmid DNA comprising a sequence coding for the guide RNA and a promoter. A guide RNA or a guide polynucleotide can also be transferred into a cell in other way, such as using virus-mediated gene delivery.

[0304] A guide RNA or a guide polynucleotide can be isolated. For example, a guide RNA can be transfected in the form of an isolated RNA into a cell or organism. A guide RNA can be prepared by in vitro transcription using any in vitro transcription system known in the art. A guide RNA can be transferred to a cell in the form of isolated RNA rather than in the form of plasmid comprising encoding sequence for a guide RNA.

[0305] A guide RNA or a guide polynucleotide can comprise three regions: a first region at the 5′ end that can be complementary to a target site in a chromosomal sequence, a second internal region that can form a stem loop structure, and a third 3′ region that can be single-stranded. A first region of each guide RNA can also be different such that each guide RNA guides a fusion protein to a specific target site. Further, second and third regions of each guide RNA can be identical in all guide RNAs.

[0306] A first region of a guide RNA or a guide polynucleotide can be complementary to sequence at a target site in a chromosomal sequence such that the first region of the guide RNA can base pair with the target site. In some cases, a first region of a guide RNA can comprise from or from about 10 nucleotides to 25 nucleotides (i.e., from 10 nucleotides to nucleotides; or from about 10 nucleotides to about 25 nucleotides; or from 10 nucleotides to about 25 nucleotides; or from about 10 nucleotides to 25 nucleotides) or more. For example, a region of base pairing between a first region of a guide RNA and a target site in a chromosomal sequence can be or can be about 10, 11, 12, 13, 14, 15, 16, 17, 18, 19, 20, 22, 23, 24, 25, or more nucleotides in length. Sometimes, a first region of a guide RNA can be or can be about 19, 20, or 21 nucleotides in length.

[0307] A guide RNA or a guide polynucleotide can also comprise a second region that forms a secondary structure. For example, a secondary structure formed by a guide RNA can comprise a stem (or hairpin) and a loop. A length of a loop and a stem can vary. For example, a loop can range from or from about 3 to 10 nucleotides in length, and a stem can range from or from about 6 to 20 base pairs in length. A stem can comprise one or more bulges of 1 to 10 or about 10 nucleotides. The overall length of a second region can range from or from about 16 to 60 nucleotides in length. For example, a loop can be or can be about 4 nucleotides in length and a stem can be or can be about 12 base pairs.

[0308] A guide RNA or a guide polynucleotide can also comprise a third region at the 3′ end that can be essentially single-stranded. For example, a third region is sometimes not complementarity to any chromosomal sequence in a cell of interest and is sometimes not complementarity to the rest of a guide RNA. Further, the length of a third region can vary. A third region can be more than or more than about 4 nucleotides in length. For example, the length of a third region can range from or from about 5 to 60 nucleotides in length.

[0309] A guide RNA or a guide polynucleotide can target any exon or intron of a gene target. In some cases, a guide can target exon 1 or 2 of a gene, in other cases; a guide can target exon 3 or 4 of a gene. A composition can comprise multiple guide RNAs that all target the same exon or in some cases, multiple guide RNAs that can target different exons. An exon and an intron of a gene can be targeted.

[0310] A guide RNA or a guide polynucleotide can target a nucleic acid sequence of or of about 20 nucleotides. A target nucleic acid can be less than or less than about 20 nucleotides. A target nucleic acid can be at least or at least about 5, 10, 15, 16, 17, 18, 19, 20, 21, 22, 23, 24, 25, 30, or anywhere between 1-100 nucleotides in length. A target nucleic acid can be at most or at most about 5, 10, 15, 16, 17, 18, 19, 20, 21, 22, 23, 24, 25, 30, 40, 50, or anywhere between 1-100 nucleotides in length. A target nucleic acid sequence can be or can be about 20 bases immediately 5′ of the first nucleotide of the PAM. A guide RNA can target a nucleic acid sequence. A target nucleic acid can be at least or at least about 1-10, 1-20, 1-30, 1-40, 1-50, 1-60, 1-70, 1-80, 1-90, or 1-100 nucleotides.

[0311] A guide polynucleotide, for example, a guide RNA, can refer to a nucleic acid that can hybridize to another nucleic acid, for example, the target nucleic acid or protospacer in a genome of a cell. A guide polynucleotide can be RNA. A guide polynucleotide can be DNA. The guide polynucleotide can be programmed or designed to bind to a sequence of nucleic acid site-specifically. A guide polynucleotide can comprise a polynucleotide chain and can be called a single guide polynucleotide. A guide polynucleotide can comprise two polynucleotide chains and can be called a double guide polynucleotide. A guide RNA can be introduced into a cell or embryo as an RNA molecule. For example, a RNA molecule can be transcribed in vitro and/or can be chemically synthesized. An RNA can be transcribed from a synthetic DNA molecule, e.g., a gBlocks® gene fragment. A guide RNA can then be introduced into a cell or embryo as an RNA molecule. A guide RNA can also be introduced into a cell or embryo in the form of a non-RNA nucleic acid molecule, e.g., DNA molecule. For example, a DNA encoding a guide RNA can be operably linked to promoter control sequence for expression of the guide RNA in a cell or embryo of interest. A RNA coding sequence can be operably linked to a promoter sequence that is recognized by RNA polymerase III (Pol III). Plasmid vectors that can be used to express guide RNA include, but are not limited to, px330 vectors and px333 vectors. In some cases, a plasmid vector (e.g., px333 vector) can comprise at least two guide RNA-encoding DNA sequences.

[0312] Methods for selecting, designing, and validating guide polynucleotides, e.g., guide RNAs and targeting sequences are described herein and known to those skilled in the art. For example, to minimize the impact of potential substrate promiscuity of a deaminase domain in the nucleobase editor system (e.g., an AID domain), the number of residues that could unintentionally be targeted for deamination (e.g., off-target C residues that could potentially reside on ssDNA within the target nucleic acid locus) may be minimized. In addition, software tools can be used to optimize the gRNAs corresponding to a target nucleic acid sequence, e.g., to minimize total off-target activity across the genome. For example, for each possible targeting domain choice using S. pyogenes Cas9, all off-target sequences (preceding selected PAMs, e.g., NAG or NGG) may be identified across the genome that contain up to certain number (e.g., 1, 2, 3, 4, 5, 6, 7, 8, 9, or 10) of mismatched base-pairs. First regions of gRNAs complementary to a target site can be identified, and all first regions (e.g., crRNAs) can be ranked according to its total predicted off-target score; the top-ranked targeting domains represent those that are likely to have the greatest on-target and the least off-target activity. Candidate targeting gRNAs can be functionally evaluated by using methods known in the art and/or as set forth herein.

[0313] As a non-limiting example, target DNA hybridizing sequences in crRNAs of a guide RNA for use with Cas9s may be identified using a DNA sequence searching algorithm. gRNA design may be carried out using custom gRNA design software based on the public tool cas-offinder as described in Bae S., Park J., & Kim J.-S. Cas-OFFinder: A fast and versatile algorithm that searches for potential off-target sites of Cas9 RNA-guided endonucleases. Bioinformatics 30, 1473-1475 (2014). This software scores guides after calculating their genome-wide off-target propensity. Typically matches ranging from perfect matches to 7 mismatches are considered for guides ranging in length from 17 to 24. Once the off-target sites are computationally-determined, an aggregate score is calculated for each guide and summarized in a tabular output using a web-interface. In addition to identifying potential target sites adjacent to PAM sequences, the software also identifies all PAM adjacent sequences that differ by 1, 2, 3 or more than 3 nucleotides from the selected target sites. Genomic DNA sequences for a target nucleic acid sequence, e.g., a target gene may be obtained and repeat elements may be screened using publicly available tools, for example, the RepeatMasker program. RepeatMasker searches input DNA sequences for repeated elements and regions of low complexity. The output is a detailed annotation of the repeats present in a given query sequence.

[0314] Following identification, first regions of guide RNAs, e.g., crRNAs, may be ranked into tiers based on their distance to the target site, their orthogonality and presence of 5′ nucleotides for close matches with relevant PAM sequences (for example, a 5′ G based on identification of close matches in the human genome containing a relevant PAM e.g., NGG PAM for S. pyogenes, NNGRRT or NNGRRV PAM for S. aureus). As used herein, orthogonality refers to the number of sequences in the human genome that contain a minimum number of mismatches to the target sequence. A “high level of orthogonality” or “good orthogonality” may, for example, refer to 20-mer targeting domains that have no identical sequences in the human genome besides the intended target, nor any sequences that contain one or two mismatches in the target sequence. Targeting domains with good orthogonality may be selected to minimize off-target DNA cleavage.

[0315] In some embodiments, a reporter system may be used for detecting base-editing activity and testing candidate guide polynucleotides. In some embodiments, a reporter system may comprise a reporter gene based assay where base editing activity leads to expression of the reporter gene. For example, a reporter system may include a reporter gene comprising a deactivated start codon, e.g., a mutation on the template strand from 3′-TAC-S′ to 3′-CAC-S′. Upon successful deamination of the target C, the corresponding mRNA will be transcribed as 5′-AUG-3′ instead of 5′-GUG-3′, enabling the translation of the reporter gene. Suitable reporter genes will be apparent to those of skill in the art. Non-limiting examples of reporter genes include gene encoding green fluorescence protein (GFP), red fluorescence protein (RFP), luciferase, secreted alkaline phosphatase (SEAP), or any other gene whose expression are detectable and apparent to those skilled in the art. The reporter system can be used to test many different gRNAs, e.g., in order to determine which residue(s) with respect to the target DNA sequence the respective deaminase will target. sgRNAs that target non-template strand can also be tested in order to assess off-target effects of a specific base editing protein, e.g., a Cas9 deaminase fusion protein. In some embodiments, such gRNAs can be designed such that the mutated start codon will not be base-paired with the gRNA. The guide polynucleotides can comprise standard ribonucleotides, modified ribonucleotides (e.g., pseudouridine), ribonucleotide isomers, and/or ribonucleotide analogs. In some embodiments, the guide polynucleotide can comprise at least one detectable label. The detectable label can be a fluorophore (e.g., FAM, TMR, Cy3, Cy5, Texas Red, Oregon Green, Alexa Fluors, Halo tags, or suitable fluorescent dye), a detection tag (e.g., biotin, digoxigenin, and the like), quantum dots, or gold particles.

[0316] The guide polynucleotides can be synthesized chemically, synthesized enzymatically, or a combination thereof. For example, the guide RNA can be synthesized using standard phosphoramidite-based solid-phase synthesis methods. Alternatively, the guide RNA can be synthesized in vitro by operably linking DNA encoding the guide RNA to a promoter control sequence that is recognized by a phage RNA polymerase. Examples of suitable phage promoter sequences include T7, T3, SP6 promoter sequences, or variations thereof. In embodiments in which the guide RNA comprises two separate molecules (e.g., crRNA and tracrRNA), the crRNA can be chemically synthesized and the tracrRNA can be enzymatically synthesized.

[0317] In some embodiments, a base editor system may comprise multiple guide polynucleotides, e.g., gRNAs. For example, the gRNAs may target to one or more target loci (e.g., at least 1 gRNA, at least 2 gRNA, at least 5 gRNA, at least 10 gRNA, at least 20 gRNA, at least 30 g RNA, at least 50 gRNA) comprised in a base editor system. The multiple gRNA sequences can be tandemly arranged and are preferably separated by a direct repeat.

[0318] A DNA sequence encoding a guide RNA or a guide polynucleotide can also be part of a vector. Further, a vector can comprise additional expression control sequences (e.g., enhancer sequences, Kozak sequences, polyadenylation sequences, transcriptional termination sequences, etc.), selectable marker sequences (e.g., GFP or antibiotic resistance genes such as puromycin), origins of replication, and the like. A DNA molecule encoding a guide RNA can also be linear. A DNA molecule encoding a guide RNA or a guide polynucleotide can also be circular.

[0319] In some embodiments, one or more components of a base editor system may be encoded by DNA sequences. Such DNA sequences may be introduced into an expression system, e.g., a cell, together or separately. For example, DNA sequences encoding a polynucleotide programmable nucleotide binding domain and a guide RNA may be introduced into a cell, each DNA sequence can be part of a separate molecule (e.g., one vector containing the polynucleotide programmable nucleotide binding domain coding sequence and a second vector containing the guide RNA coding sequence) or both can be part of a same molecule (e.g., one vector containing coding (and regulatory) sequence for both the polynucleotide programmable nucleotide binding domain and the guide RNA).

[0320] A guide polynucleotide can comprise one or more modifications to provide a nucleic acid with a new or enhanced feature. A guide polynucleotide can comprise a nucleic acid affinity tag. A guide polynucleotide can comprise synthetic nucleotide, synthetic nucleotide analog, nucleotide derivatives, and/or modified nucleotides.

[0321] In some cases, a gRNA or a guide polynucleotide can comprise modifications. A modification can be made at any location of a gRNA or a guide polynucleotide. More than one modification can be made to a single gRNA or a guide polynucleotide. A gRNA or a guide polynucleotide can undergo quality control after a modification. In some cases, quality control can include PAGE, HPLC, MS, or any combination thereof.

[0322] A modification of a gRNA or a guide polynucleotide can be a substitution, insertion, deletion, chemical modification, physical modification, stabilization, purification, or any combination thereof.

[0323] A gRNA or a guide polynucleotide can also be modified by 5′adenylate, 5′ guanosine-triphosphate cap, 5′N7-Methylguanosine-triphosphate cap, 5′triphosphate cap, 3′phosphate, 3′thiophosphate, 5′phosphate, 5′thiophosphate, Cis-Syn thymidine dimer, trimers, C12 spacer, C3 spacer, C6 spacer, dSpacer, PC spacer, rSpacer, Spacer 18, Spacer 9,3′-3′ modifications, 5′-5′ modifications, abasic, acridine, azobenzene, biotin, biotin BB, biotin TEG, cholesteryl TEG, desthiobiotin TEG, DNP TEG, DNP-X, DOTA, dT-Biotin, dual biotin, PC biotin, psoralen C2, psoralen C6, TINA, 3′DABCYL, black hole quencher 1, black hole quencer 2, DABCYL SE, dT-DABCYL, IRDye QC-1, QSY-21, QSY-35, QSY-7, QSY-9, carboxyl linker, thiol linkers, 2′-deoxyribonucleoside analog purine, 2′-deoxyribonucleoside analog pyrimidine, ribonucleoside analog, 2′-O-methyl ribonucleoside analog, sugar modified analogs, wobble/universal bases, fluorescent dye label, 2′-fluoro RNA, 2′-O-methyl RNA, methylphosphonate, phosphodiester DNA, phosphodiester RNA, phosphothioate DNA, phosphorothioate RNA, UNA, pseudouridine-5′-triphosphate, 5′-methylcytidine-5′-triphosphate, or any combination thereof.

[0324] In some cases, a modification is permanent. In other cases, a modification is transient. In some cases, multiple modifications are made to a gRNA or a guide polynucleotide. A gRNA or a guide polynucleotide modification can alter physiochemical properties of a nucleotide, such as their conformation, polarity, hydrophobicity, chemical reactivity, base-pairing interactions, or any combination thereof.

[0325] The PAM sequence can be any PAM sequence known in the art. Suitable PAM sequences include, but are not limited to, NGG, NGA, NGC, NGN, NGT, NGCG, NGAG, NGAN, NGNG, NGCN, NGCG, NGTN, NNGRRT, NNNRRT, NNGRR(N), TTTV, TYCV, TYCV, TATV, NNNNGATT, NNAGAAW, or NAAAAC. Y is a pyrimidine; N is any nucleotide base; W is A or T.

[0326] A modification can also be a phosphorothioate substitute. In some cases, a natural phosphodiester bond can be susceptible to rapid degradation by cellular nucleases and; a modification of internucleotide linkage using phosphorothioate (PS) bond substitutes can be more stable towards hydrolysis by cellular degradation. A modification can increase stability in a gRNA or a guide polynucleotide. A modification can also enhance biological activity. In some cases, a phosphorothioate enhanced RNA gRNA can inhibit RNase A, RNase T1, calf serum nucleases, or any combinations thereof. These properties can allow the use of PS-RNA gRNAs to be used in applications where exposure to nucleases is of high probability in vivo or in vitro. For example, phosphorothioate (PS) bonds can be introduced between the last 3-5 nucleotides at the 5′- or ″-end of a gRNA which can inhibit exonuclease degradation. In some cases, phosphorothioate bonds can be added throughout an entire gRNA to reduce attack by endonucleases.

### Protospacer Adjacent Motif

[0327] The term “protospacer adjacent motif (PAM)” or PAM-like motif refers to a 2-6 base pair DNA sequence immediately following the DNA sequence targeted by the Cas9 nuclease in the CRISPR bacterial adaptive immune system. In some embodiments, the PAM can be a 5′ PAM (i.e., located upstream of the 5′ end of the protospacer). In other embodiments, the PAM can be a 3′ PAM (i.e., located downstream of the 5′ end of the protospacer).

[0328] The PAM sequence is essential for target binding, but the exact sequence depends on a type of Cas protein.

[0329] A base editor provided herein can comprise a CRISPR protein-derived domain that is capable of binding a nucleotide sequence that contains a canonical or non-canonical protospacer adjacent motif (PAM) sequence. A PAM site is a nucleotide sequence in proximity to a target polynucleotide sequence. Some aspects of the disclosure provide for base editors comprising all or a portion of CRISPR proteins that have different PAM specificities. For example, typically Cas9 proteins, such as Cas9 from S. pyogenes (spCas9), require a canonical NGG PAM sequence to bind a particular nucleic acid region, where the “N” in “NGG” is adenine (A), thymine (T), guanine (G), or cytosine (C), and the G is guanine. A PAM can be CRISPR protein-specific and can be different between different base editors comprising different CRISPR protein-derived domains. A PAM can be 5′ or 3′ of a target sequence. A PAM can be upstream or downstream of a target sequence. A PAM can be 1, 2, 3, 4, 5, 6, 7, 8, 9, 10 or more nucleotides in length. Often, a PAM is between 2-6 nucleotides in length. Several PAM variants are described in Table 1 below.

TABLE 1
Cas9 proteins and corresponding PAM sequences

| Variant | PAM |
|---|---|
| spCas9 | NGG |
| spCas9-VRQR | NGA |
| spCas9-VRER | NGCG |
| spCas9-MQKFRAER | NGC |
| xCas9 (sp) | NGN |
| saCas9 | NNGRRT |
| saCas9-KKH | NNNRRT |
| spCas9-MQKSER | NGCG |
| spCas9-MQKSER | NGCN |
| spCas9-LRKIQK | NGTN |
| spCas9-LRVSQK | NGTN |
| spCas9-LRVSQL | NGTN |
| SpyMacCas9 | NAA |
| Cpf1 | 5′ (TTTV) |

[0330] In some embodiments, the PAM is NGC. In some embodiments, the NGC PAM is recognized by a Cas9 variant. In some embodiments, the NGC PAM variant includes one or more amino acid substitutions selected from D1135M, S1136Q, G1218K, E1219F, A1322R, D1332A, R1335E, and T1337R (collectively termed “MQKFRAER”).

[0331] In some embodiments, the PAM is NGT. In some embodiments, the NGT PAM is recognized by a Cas9 variant. In some embodiments, the NGT PAM variant is generated through targeted mutations at one or more residues 1335, 1337, 1135, 1136, 1218, and/or 1219. In some embodiments, the NGT PAM variant is created through targeted mutations at one or more residues 1219, 1335, 1337, 1218. In some embodiments, the NGT PAM variant is created through targeted mutations at one or more residues 1135, 1136, 1218, 1219, and 1335. In some embodiments, the NGT PAM variant is selected from the set of targeted mutations provided in Tables 2 and 3 below.

TABLE 2
NGT PAM Variant Mutations at residues
1219, 1335, 1337, 1218

| Variant | E1219V | R1335Q | T1337 | G1218 |
|---|---|---|---|---|
| 1 | F | V | T | |
| 2 | F | V | R | |
| 3 | F | V | Q | |
| 4 | F | V | L | |
| 5 | F | V | T | R |
| 6 | F | V | R | R |
| 7 | F | V | Q | R |
| 8 | F | V | L | R |
| 9 | L | L | T | |
| 10 | L | L | R | |
| 11 | L | L | Q | |
| 12 | L | L | L | |
| 13 | F | I | T | |
| 14 | F | I | R | |
| 15 | F | I | Q | |
| 16 | F | I | L | |
| 17 | F | G | C | |
| 18 | H | L | N | |
| 19 | F | G | C | A |
| 20 | H | L | N | V |
| 21 | L | A | W | |
| 22 | L | A | F | |
| 23 | L | A | Y | |
| 24 | I | A | W | |
| 25 | I | A | F | |
| 26 | I | A | Y | |

TABLE 3
NGT PAM Variant Mutations at residues
1135, 1136, 1218, 1219, and 1335

| Variant | D1135L | S1136R | G1218S | E1219V | R1335Q |
|---|---|---|---|---|---|
| 27 | G | | | | |
| 28 | V | | | | |
| 29 | I | | | | |
| 30 | | A | | | |
| 31 | | W | | | |
| 32 | | H | | | |
| 33 | | K | | | |
| 34 | | | K | | |
| 35 | | | R | | |
| 36 | | | Q | | |
| 37 | | | T | | |
| 38 | | | N | | |
| 39 | | | | I | |
| 40 | | | | A | |
| 41 | | | | N | |
| 42 | | | | Q | |
| 43 | | | | G | |
| 44 | | | | L | |
| 45 | | | | S | |
| 46 | | | | T | |
| 47 | | | | | L |
| 48 | | | | | I |
| 49 | | | | | V |
| 50 | | | | | N |
| 51 | | | | | S |
| 52 | | | | | T |
| 53 | | | | | F |
| 54 | | | | | Y |
| 55 | N1286Q | I1331F | | | |

[0332] In some embodiments, the NGT PAM variant is selected from variant 5, 7, 28, 31, or 36 in Tables 2 and 3. In some embodiments, the variants have improved NGT PAM recognition.

[0333] In some embodiments, the NGT PAM variants have mutations at residues 1219, 1335, 1337, and/or 1218. In some embodiments, the NGT PAM variant is selected with mutations for improved recognition from the variants provided in Table 4 below.

TABLE 4
NGT PAM Variant Mutations at residues
1219, 1335, 1337, and 1218

| Variant | E1219V | R1335Q | T1337 | G1218 |
|---|---|---|---|---|
| 1 | F | V | T | |
| 2 | F | V | R | |
| 3 | F | V | Q | |
| 4 | F | V | L | |
| 5 | F | V | T | R |
| 6 | F | V | R | R |
| 7 | F | V | Q | R |
| 8 | F | V | L | R |

[0334] In some embodiments, the NGT PAM is selected from the variants provided in Table 5 below.

TABLE 5
NGT PAM variants

| | NGTN | | | | | | | |
|---|---|---|---|---|---|---|---|---|
| | variant | D1135 | S1136 | G1218 | E1219 | A1322R | R1335 | T1337 |
| Variant 1 | LRKIQK | L | R | K | I | — | Q | K |
| Variant 2 | LRSVQK | L | R | S | V | — | Q | K |
| Variant 3 | LRSVQL | L | R | S | V | — | Q | L |
| Variant 4 | LRKIRQK | L | R | K | I | R | Q | K |
| Variant 5 | LRSVRQK | L | R | S | V | R | Q | K |
| Variant 6 | LRSVRQL | L | R | S | V | R | Q | L |

[0335] In some embodiments the NGTN variant is variant 1. In some embodiments, the NGTN variant is variant 2. In some embodiments, the NGTN variant is variant 3. In some embodiments, the NGTN variant is variant 4. In some embodiments, the NGTN variant is variant 5. In some embodiments, the NGTN variant is variant 6.

[0336] In some embodiments, the Cas9 domain is a Cas9 domain from Streptococcus pyogenes (SpCas9). In some embodiments, the SpCas9 domain is a nuclease active SpCas9, a nuclease inactive SpCas9 (SpCas9d), or a SpCas9 nickase (SpCas9n). In some embodiments, the SpCas9 comprises a D9X mutation, or a corresponding mutation in any of the amino acid sequences provided herein, wherein X is any amino acid except for D. In some embodiments, the SpCas9 comprises a D9A mutation, or a corresponding mutation in any of the amino acid sequences provided herein. In some embodiments, the SpCas9 domain, the SpCas9d domain, or the SpCas9n domain can bind to a nucleic acid sequence having a non-canonical PAM. In some embodiments, the SpCas9 domain, the SpCas9d domain, or the SpCas9n domain can bind to a nucleic acid sequence having an NGG, a NGA, or a NGCG PAM sequence.

[0337] In some embodiments, the SpCas9 domain comprises one or more of a D1135X, a R1335X, and a T1337X mutation, or a corresponding mutation in any of the amino acid sequences provided herein, wherein X is any amino acid. In some embodiments, the SpCas9 domain comprises one or more of a D1135E, R1335Q, and T1337R mutation, or a corresponding mutation in any of the amino acid sequences provided herein. In some embodiments, the SpCas9 domain comprises a D1135E, a R1335Q, and a T1337R mutation, or corresponding mutations in any of the amino acid sequences provided herein. In some embodiments, the SpCas9 domain comprises one or more of a D1135X, a R1335X, and a T1337T1337X mutation, or a corresponding mutation in any of the amino acid sequences provided herein, wherein X is any amino acid. In some embodiments, the SpCas9 domain comprises one or more of a D1135V, a R1335Q, and a T1337R mutation, or a corresponding mutation in any of the amino acid sequences provided herein. In some embodiments, the SpCas9 domain comprises a D1135V, a R1335Q, and a T1337R mutation, or corresponding mutations in any of the amino acid sequences provided herein. In some embodiments, the SpCas9 domain comprises one or more of a D1135X, a G1218X, a R1335X, and a T1337X mutation, or a corresponding mutation in any of the amino acid sequences provided herein, wherein X is any amino acid. In some embodiments, the SpCas9 domain comprises one or more of a D1135V, a G1218R, a R1335Q, and a T1337R mutation, or a corresponding mutation in any of the amino acid sequences provided herein. In some embodiments, the SpCas9 domain comprises a D1135V, a G1218R, a R1335Q, and a T1337R mutation, or corresponding mutations in any of the amino acid sequences provided herein.

[0338] In some embodiments, the Cas9 domains of any of the fusion proteins provided herein comprises an amino acid sequence that is at least 60%, at least 65%, at least 70%, at least 75%, at least 80%, at least 85%, at least 90%, at least 95%, at least 96%, at least 97%, at least 98%, at least 99%, or at least 99.5% identical to a Cas9 polypeptide described herein. In some embodiments, the Cas9 domains of any of the fusion proteins provided herein comprises the amino acid sequence of any Cas9 polypeptide described herein. In some embodiments, the Cas9 domains of any of the fusion proteins provided herein consists of the amino acid sequence of any Cas9 polypeptide described herein.

[0339] In some examples, a PAM recognized by a CRISPR protein-derived domain of a base editor disclosed herein can be provided to a cell on a separate oligonucleotide to an insert (e.g., an AAV insert) encoding the base editor. In such embodiments, providing PAM on a separate oligonucleotide can allow cleavage of a target sequence that otherwise would not be able to be cleaved, because no adjacent PAM is present on the same polynucleotide as the target sequence.

[0340] In an embodiment, S. pyogenes Cas9 (SpCas9) can be used as a CRISPR endonuclease for genome engineering. However, others can be used. In some embodiments, a different endonuclease can be used to target certain genomic targets. In some embodiments, synthetic SpCas9-derived variants with non-NGG PAM sequences can be used. Additionally, other Cas9 orthologues from various species have been identified and these “non-SpCas9s” can bind a variety of PAM sequences that can also be useful for the present disclosure. For example, the relatively large size of SpCas9 (approximately 4 kb coding sequence) can lead to plasmids carrying the SpCas9 cDNA that cannot be efficiently expressed in a cell. Conversely, the coding sequence for Staphylococcus aureus Cas9 (SaCas9) is approximately 1 kilobase shorter than SpCas9, possibly allowing it to be efficiently expressed in a cell. Similar to SpCas9, the SaCas9 endonuclease is capable of modifying target genes in mammalian cells in vitro and in mice in vivo. In some embodiments, a Cas protein can target a different PAM sequence. In some embodiments, a target gene can be adjacent to a Cas9 PAM, 5′-NGG, for example. In other embodiments, other Cas9 orthologs can have different PAM requirements. For example, other PAMs such as those of S. thermophilus (5′-NNAGAA for CRISPR1 and 5′-NGGNG for CRISPR3) and Neisseria meningitidis (5′-NNNNGATT) can also be found adjacent to a target gene.

[0341] In some embodiments, for a S. pyogenes system, a target gene sequence can precede (i.e., be 5′ to) a 5′-NGG PAM, and a 20-nt guide RNA sequence can base pair with an opposite strand to mediate a Cas9 cleavage adjacent to a PAM. In some embodiments, an adjacent cut can be or can be about 3 base pairs upstream of a PAM. In some embodiments, an adjacent cut can be or can be about 10 base pairs upstream of a PAM. In some embodiments, an adjacent cut can be or can be about 0-20 base pairs upstream of a PAM. For example, an adjacent cut can be next to, 1, 2, 3, 4, 5, 6, 7, 8, 9, 10, 11, 12, 13, 14, 15, 16, 17, 18, 19, 20, 21, 22, 23, 24, 25, 26, 27, 28, 29, or 30 base pairs upstream of a PAM. An adjacent cut can also be downstream of a PAM by 1 to 30 base pairs. The sequences of exemplary SpCas9 proteins capable of binding a PAM sequence follow:

[0342] The amino acid sequence of an exemplary PAM-binding SpCas9 is as follows:

MDKKYSIGLDIGTNSVGWAVITDEYKVPSKKFKVLGNTDRHSIKKNLIG
ALLFDSGETAEATRLKRTARRRYTRRKNRICYLQEIFSNEMAKVDDSFF
HRLEESFLVEEDKKHERHPIFGNIVDEVAYHEKYPTIYHLRKKLVDSTD
KADLRLIYLALAHMIKFRGHFLIEGDLNPDNSDVDKLFIQLVQTYNQLF
EENPINASGVDAKAILSARLSKSRRLENLIAQLPGEKKNGLFGNLIALS
LGLTPNFKSNFDLAEDAKLQLSKDTYDDDLDNLLAQIGDQYADLFLAAK
NLSDAILLSDILRVNTEITKAPLSASMIKRYDEHHQDLTLLKALVRQQL
PEKYKEIFFDQSKNGYAGYIDGGASQEEFYKFIKPILEKMDGTEELLVK
LNREDLLRKQRTFDNGSIPHQIHLGELHAILRRQEDFYPFLKDNREKIE
KILTFRIPYYVGPLARGNSRFAWMTRKSEETITPWNFEEVVDKGASAQS
FIERMTNFDKNLPNEKVLPKHSLLYEYFTVYNELTKVKYVTEGMRKPAF
LSGEQKKAIVDLLFKTNRKVTVKQLKEDYFKKIECFDSVEISGVEDRFN
ASLGTYHDLLKIIKDKDFLDNEENEDILEDIVLTLTLFEDREMIEERLK
TYAHLFDDKVMKQLKRRRYTGWGRLSRKLINGIRDKQSGKTILDFLKSD
GFANRNFMQLIHDDSLTFKEDIQKAQVSGQGDSLHEHIANLAGSPAIKK
GILQTVKVVDELVKVMGRHKPENIVIEMARENQTTQKGQKNSRERMKRI
EEGIKELGSQILKEHPVENTQLQNEKLYLYYLQNGRDMYVDQELDINRL
SDYDVDHIVPQSFLKDDSIDNKVLTRSDKNRGKSDNVPSEEVVKKMKNY
WRQLLNAKLITQRKFDNLTKAERGGLSELDKAGFIKRQLVETRQITKHV
AQILDSRMNTKYDENDKLIREVKVITLKSKLVSDFRKDFQFYKVREINN
YHHAHDAYLNAVVGTALIKKYPKLESEFVYGDYKVYDVRKMIAKSEQEI
GKATAKYFFYSNIMNFFKTEITLANGEIRKRPLIETNGETGEIVWDKGR
DFATVRKVLSMPQVNIVKKTEVOTGGFSKESILPKRNSDKLIARKKDWD
PKKYGGFDSPTVAYSVLVVAKVEKGKSKKLKSVKELLGITIMERSSFEK
NPIDFLEAKGYKEVKKDLIIKLPKYSLFELENGRKRMLASAGELQKGNE
LALPSKYVNFLYLASHYEKLKGSPEDNEQKQLFVEQHKHYLDEIIEQIS
EFSKRVILADANLDKVLSAYNKHRDKPIREQAENIIHLFTLTNLGAPAA
FKYFDTTIDRKRYTSTKEVLDATLIHQSITGLYETRIDLSQLGGD.

[0343] The amino acid sequence of an exemplary PAM-binding SpCas9n is as follows:

MDKKYSIGLAIGTNSVGWAVITDEYKVPSKKFKVLGNTDRHSIKKNLIG
ALLFDSGETAEATRLKRTARRRYTRRKNRICYLQEIFSNEMAKVDDSFF
HRLEESFLVEEDKKHERHPIFGNIVDEVAYHEKYPTIYHLRKKLVDSTD
KADLRLIYLALAHMIKFRGHFLIEGDLNPDNSDVDKLFIQLVQTYNQLF
EENPINASGVDAKAILSARLSKSRRLENLIAQLPGEKKNGLFGNLIALS
LGLTPNFKSNFDLAEDAKLQLSKDTYDDDLDNLLAQIGDQYADLFLAAK
NLSDAILLSDILRVNTEITKAPLSASMIKRYDEHHQDLTLLKALVRQQL
PEKYKEIFFDQSKNGYAGYIDGGASQEEFYKFIKPILEKMDGTEELLVK
LNREDLLRKQRTFDNGSIPHQIHLGELHAILRRQEDFYPFLKDNREKIE
KILTFRIPYYVGPLARGNSRFAWMTRKSEETITPWNFEEVVDKGASAQS
FIERMTNFDKNLPNEKVLPKHSLLYEYFTVYNELTKVKYVTEGMRKPAF
LSGEQKKAIVDLLFKTNRKVTVKQLKEDYFKKIECFDSVEISGVEDRFN
ASLGTYHDLLKIIKDKDFLDNEENEDILEDIVLTLTLFEDREMIEERLK
TYAHLFDDKVMKQLKRRRYTGWGRLSRKLINGIRDKQSGKTILDFLKSD
GFANRNFMQLIHDDSLTFKEDIQKAQVSGQGDSLHEHIANLAGSPAIKK
GILQTVKVVDELVKVMGRHKPENIVIEMARENQTTQKGQKNSRERMKRI
EEGIKELGSQILKEHPVENTQLQNEKLYLYYLQNGRDMYVDQELDINRL
SDYDVDHIVPQSFLKDDSIDNKVLTRSDKNRGKSDNVPSEEVVKKMKNY
WRQLLNAKLITQRKFDNLTKAERGGLSELDKAGFIKRQLVETRQITKHV
AQILDSRMNTKYDENDKLIREVKVITLKSKLVSDFRKDFQFYKVREINN
YHHAHDAYLNAVVGTALIKKYPKLESEFVYGDYKVYDVRKMIAKSEQEI
GKATAKYFFYSNIMNFFKTEITLANGEIRKRPLIETNGETGEIVWDKGR
DFATVRKVLSMPQVNIVKKTEVQTGGFSKESILPKRNSDKLIARKKDWD
PKKYGGFDSPTVAYSVLVVAKVEKGKSKKLKSVKELLGITIMERSSFEK
NPIDFLEAKGYKEVKKDLIIKLPKYSLFELENGRKRMLASAGELQKGNE
LALPSKYVNFLYLASHYEKLKGSPEDNEQKQLFVEQHKHYLDEIIEQIS
EFSKRVILADANLDKVLSAYNKHRDKPIREQAENIIHLFTLTNLGAPAA
FKYFDTTIDRKRYTSTKEVLDATLIHQSITGLYETRIDLSQLGGD.

[0344] The amino acid sequence of an exemplary PAM-binding SpEQR Cas9 is as follows:

MDKKYSIGLAIGTNSVGWAVITDEYKVPSKKFKVLGNTDRHSIKKNLIG
ALLFDSGETAEATRLKRTARRRYTRRKNRICYLQEIFSNEMAKVDDSFF
HRLEESFVEEDKKHERHPIFGNIVDEVAYHEKYPTIYHLRKKLVDSTDK
ADLRLIYLALAHMIKFRGHFLIEGDLNPDNSDVDKLFIQLVQTYNQLFE
ENPINASGVDAKAILSARLSKSRRLENLIAQLPGEKKNGLFGNLIALSL
GLTPNFKSNFDLAEDAKLQLSKDTYDDDLDNLLAQIGDQYADLFLAAKN
LSDAILLSDILRVNTEITKAPLSASMIKRYDEHHQDLTLLKALVRQQLP
EKYKEIFFDQSKNGYAGYIDGGASQEEFYKFIKPILEKMDGTEELLVKL
NREDLLRKQRTFDNGSIPHQIHLGELHAILRRQEDFYPFLKDNREKIEK
ILTFRIPYYVGPLARGNSRFAWMTRKSEETITPWNFEEVVDKGASAQSF
IERMTNFDKNLPNEKVLPKHSLLYEYFTVYNELTKVKYVTEGMRKPAFL
SGEQKKAIVDLLFKTNRKVTVKQLKEDYFKKIECFDSVEISGVEDRFNA
SLGTYHDLLKIIKDKDFLDNEENEDILEDIVLTLTLFEDREMIEERLKT
YAHLFDDKVMKQLKRRRYTGWGRLSRKLINGIRDKQSGKTILDFLKSDG
FANRNFMQLIHDDSLTFKEDIQKAQVSGQGDSLHEHIANLAGSPAIKKG
ILQTVKVVDELVKVMGRHKPENIVIEMARENQTTQKGQKNSRERMKRIE
EGIKELGSQILKEHPVENTQLQNEKLYLYYLQNGRDMYVDQELDINRLS
DYDVDHIVPQSFLKDDSIDNKVLTRSDKNRGKSDNVPSEEVVKKMKNYW
RQLLNAKLITQRKFDNLTKAERGGLSELDKAGFIKRQLVETRQITKHVA
QILDSRMNTKYDENDKLIREVKVITLKSKLVSDFRKDFQFYKVREINNY
HHAHDAYLNAVVGTALIKKYPKLESEFVYGDYKVYDVRKMIAKSEQEIG
KATAKYFFYSNIMNFFKTEITLANGEIRKRPLIETNGETGEIVWDKGRD
FATVRKVLSMPQVNIVKKTEVQTGGFSKESILPKRNSDKLIARKKDWDP
KKYGGF [symbol] SPTVAYSVLVVAKVEKGKSKKLKSVKELLGITIMERSSFEKN
PIDFLEAKGYKEVKKDLIIKLPKYSLFELENGRKRMLASAGELQKGNEL
ALPSKYVNFLYLASHYEKLKGSPEDNEQKQLFVEQHKHYLDEIIEQISE
FSKRVILADANLDKVLSAYNKHRDKPIREQAENIIHLFTLTNLGAPAAF
KYFDTTIDRK [symbol] Y [symbol] STKEVLDATLIHQSITGLYETRIDLSQLGGD.
In this sequence, residues E1135, Q1335 and
R1337, which can be mutated from D1135, R1335,
and T1337 to yield a SpEQR Cas9, are underlined
and in bold.

[0345] The amino acid sequence of an exemplary PAM-binding SpVQR Cas9 is as follows:

MDKKYSIGLAIGTNSVGWAVITDEYKVPSKKFKVLGNTDRHSIKKNLIG
ALLFDSGETAEATRLKRTARRRYTRRKNRICYLQEIFSNEMAKVDDSFF
HRLEESFLVEEDKKHERHPIFGNIVDEVAYHEKYPTIYHLRKKLVDSTD
KADLRLIYLALAHMIKFRGHFLIEGDLNPDNSDVDKLFIQLVQTYNQLF
EENPINASGVDAKAILSARLSKSRRLENLIAQLPGEKKNGLFGNLIALS
LGLTPNFKSNFDLAEDAKLQLSKDTYDDDLDNLLAQIGDQYADLFLAAK
NLSDAILLSDILRVNTEITKAPLSASMIKRYDEHHQDLTLLKALVRQQL
PEKYKEIFFDQSKNGYAGYIDGGASQEEFYKFIKPILEKMDGTEELLVK
LNREDLLRKQRTFDNGSIPHQIHLGELHAILRRQEDFYPFLKDNREKIE
KILTFRIPYYVGPLARGNSRFAWMTRKSEETITPWNFEEVVDKGASAQS
FIERMTNFDKNLPNEKVLPKHSLLYEYETVYNELTKVKYVTEGMRKPAF
LSGEQKKAIVDLLFKTNRKVTVKQLKEDYFKKIECFDSVEISGVEDRFN
ASLGTYHDLLKIIKDKDFLDNEENEDILEDIVLTLTLFEDREMIEERLK
TYAHLFDDKVMKQLKRRRYTGWGRLSRKLINGIRDKQSGKTILDFLKSD
GFANRNFMQLIHDDSLTFKEDIQKAQVSGQGDSLHEHIANLAGSPAIKK
GILQTVKVVDELVKVMGRHKPENIVIEMARENQTTQKGQKNSRERMKRI
EEGIKELGSQILKEHPVENTQLQNEKLYLYYLQNGRDMYVDQELDINRL
SDYDVDHIVPQSFLKDDSIDNKVLTRSDKNRGKSDNVPSEEVVKKMKNY
WRQLLNAKLITQRKFDNLTKAERGGLSELDKAGFIKRQLVETRQITKHV
AQILDSRMNTKYDENDKLIREVKVITLKSKLVSDFRKDFQFYKVREINN
YHHAHDAYLNAVVGTALIKKYPKLESEFVYGDYKVYDVRKMIAKSEQEI
GKATAKYFFYSNIMNFFKTEITLANGEIRKRPLIETNGETGEIVWDKGR
DFATVRKVLSMPQVNIVKKTEVQTGGFSKESILPKRNSDKLIARKKDWD
PKKYGGF [symbol] SPTVAYSVLVVAKVEKGKSKKLKSVKELLGITIMERSSFEK
NPIDFLEAKGYKEVKKDLIIKLPKYSLFELENGRKRMLASAGELQKGNE
LALPSKYVNFLYLASHYEKLKGSPEDNEQKQLFVEQHKHYLDEIIEQIS
EFSKRVILADANLDKVLSAYNKHRDKPIREQAENIIHLFTLTNLGAPAA
FKYFDTTIDRK [symbol] Y [symbol] STKEVLDATLIHQSITGLYETRIDLSQLGGD.
In this sequence, residues V1135, Q1335, and
R1337, which can be mutated from D1135, R1335,
and T1337 to yield a SpVQR Cas9, are underlined
and in bold.

[0346] The amino acid sequence of an exemplary PAM-binding SpVRER Cas9 is as follows:

MDKKYSIGLAIGTNSVGWAVITDEYKVPSKKFKVLGNTDRHSIKKNLIG
ALLFDSGETAEATRLKRTARRRYTRRKNRICYLQEIFSNEMAKVDDSFF
HRLEESFLVEEDKKHERHPIFGNIVDEVAYHEKYPTIYHLRKKLVDSTD
KADLRLIYLALAHMIKFRGHFLIEGDLNPDNSDVDKLFIQLVQTYNQLF
EENPINASGVDAKAILSARLSKSRRLENLIAQLPGEKKNGLFGNLIALS
LGLTPNFKSNFDLAEDAKLQLSKDTYDDDLDNLLAQIGDQYADLFLAAK
NLSDAILLSDILRVNTEITKAPLSASMIKRYDEHHQDLTLLKALVRQQL
PEKYKEIFFDQSKNGYAGYIDGGASQEEFYKFIKPILEKMDGTEELLVK
LNREDLLRKQRTFDNGSIPHQIHLGELHAILRRQEDFYPFLKDNREKIE
KILTFRIPYYVGPLARGNSRFAWMTRKSEETITPWNFEEVVDKGASAQS
FIERMTNFDKNLPNEKVLPKHSLLYEYFTVYNELTKVKYVTEGMRKPAF
LSGEQKKAIVDLLFKTNRKVTVKQLKEDYFKKIECFDSVEISGVEDRFN
ASLGTYHDLLKIIKDKDFLDNEENEDILEDIVLTLTLFEDREMIEERLK
TYAHLFDDKVMKQLKRRRYTGWGRLSRKLINGIRDKQSGKTILDFLKSD
GFANRNFMQLIHDDSLTFKEDIQKAQVSGQGDSLHEHIANLAGSPAIKK
GILQTVKVVDELVKVMGRHKPENIVIEMARENQTTQKGQKNSRERMKRI
EEGIKELGSQILKEHPVENTQLQNEKLYLYYLQNGRDMYVDQELDINRL
SDYDVDHIVPQSFLKDDSIDNKVLTRSDKNRGKSDNVPSEEVVKKMKNY
WRQLLNAKLITQRKFDNLTKAERGGLSELDKAGFIKRQLVETRQITKHV
AQILDSRMNTKYDENDKLIREVKVITLKSKLVSDFRKDFQFYKVREINN
YHHAHDAYLNAVVGTALIKKYPKLESEFVYGDYKVYDVRKMIAKSEQEI
GKATAKYFFYSNIMNFFKTEITLANGEIRKRPLIETNGETGEIVWDKGR
DFATVRKVLSMPQVNIVKKTEVQTGGFSKESILPKRNSDKLIARKKDWD
PKKYGGF [symbol] SPTVAYSVLVVAKVEKGKSKKLKSVKELLGITIMERSSFEK
NPIDFLEAKGYKEVKKDLIIKLPKYSLFELENGRKRMLASA [symbol] ELQKGNE
LALPSKYVNFLYLASHYEKLKGSPEDNEQKQLFVEQHKHYLDEIIEQIS
EFSKRVILADANLDKVLSAYNKHRDKPIREQAENIIHLFTLTNLGAPAA
FKYFDTTIDRK [symbol] Y [symbol] STKEVLDATLIHQSITGLYETRIDLSQLGGD.
In the above sequence, residues V1135, R1218,
Q1335, and R1337, which can be mutated from
D1134, G1217, R1335, and T1337 to yield a SpVRER
Cas9, are underlined and in bold.

[0347] In some embodiments, the Cas9 domain is a recombinant Cas9 domain. In some embodiments, the recombinant Cas9 domain is a SpyMacCas9 domain. In some embodiments, the SpyMacCas9 domain is a nuclease active SpyMacCas9, a nuclease inactive SpyMacCas9 (SpyMacCas9d), or a SpyMacCas9 nickase (SpyMacCas9n). In some embodiments, the SaCas9 domain, the SaCas9d domain, or the SaCas9n domain can bind to a nucleic acid sequence having a non-canonical PAM. In some embodiments, the SpyMacCas9 domain, the SpCas9d domain, or the SpCas9n domain can bind to a nucleic acid sequence having a NAA PAM sequence.

### Exemplary SpyMacCas9

MDKKYSIGLDIGTNSVGWAVITDDYKVPSKKFKVLGNTDRHSIKKNLIG
ALLFGSGETAEATRLKRTARRRYTRRKNRICYLQEIFSNEMAKVDDSFF
HRLEESFLVEEDKKHERHPIFGNIVDEVAYHEKYPTIYHLRKKLADSTD
KADLRLIYLALAHMIKFRGHFLIEGDLNPDNSDVDKLFIQLVQIYNQLF
EENPINASRVDAKAILSARLSKSRRLENLIAQLPGEKRNGLFGNLIALS
LGLTPNFKSNFDLAEDAKLQLSKDTYDDDLDNLLAQIGDQYADLFLAAK
NLSDAILLSDILRVNSEITKAPLSASMIKRYDEHHQDLTLLKALVRQQL
PEKYKEIFFDQSKNGYAGYIDGGASQEEFYKFIKPILEKMDGTEELLVK
LNREDLLRKQRTFDNGSIPHQIHLGELHAILRRQEDFYPFLKDNREKIE
KILTFRIPYYVGPLARGNSRFAWMTRKSEETITPWNFEEVVDKGASAQS
FIERMTNFDKNLPNEKVLPKHSLLYEYFTVYNELTKVKYVTEGMRKPAF
LSGEQKKAIVDLLFKTNRKVTVKQLKEDYFKKIECFDSVEISGVEDRFN
ASLGAYHDLLKIIKDKDFLDNEENEDILEDIVLTLTLFEDRGMIEERLK
TYAHLFDDKVMKQLKRRRYTGWGRLSRKLINGIRDKQSGKTILDFLKSD
GFANRNFMQLIHDDSLTFKEDIQKAQVSGQGHSLHEQIANLAGSPAIKK
GILQTVKIVDELVKVMGHKPENIVIEMARENQTTQKGQKNSRERMKRIE
EGIKELGSQILKEHPVENTQLQNEKLYLYYLQNGRDMYVDQELDINRLS
DYDVDHIVPQSFIKDDSIDNKVLTRSDKNRGKSDNVPSEEVVKKMKNYW
RQLLNAKLITQRKFDNLTKAERGGLSELDKAGFIKRQLVETRQITKHVA
QILDSRMNTKYDENDKLIREVKVITLKSKLVSDFRKDFQFYKVREINNY
HHAHDAYLNAVVGTALIKKYPKLESEFVYGDYKVYDVRKMIAKSEQEIG
KATAKYFFYSNIMNFFKTEITLANGEIRKRPLIETNGETGEIVWDKGRD
FATVRKVLSMPQVNIVKKTEIQTVGQNGGLFDDNPKSPLEVTPSKLVPL
KKELNPKKYGGYQKPTTAYPVLLITDTKQLIPISVMNKKQFEQNPVKFL
RDRGYQQVGKNDFIKLPKYTLVDIGDGIKRLWASSKEIHKGNQLVVSKK
SQILLYHAHHLDSDLSNDYLQNHNQQFDVLFNEIISFSKKCKLGKEHIQ
KIENVYSNKKNSASIEELAESFIKLLGFTQLGATSPFNFLGVKLNQKQY
KGKKDYILPCTEGTLIRQSITGLYETRVDLSKIGED.

[0349] In some cases, a variant Cas9 protein harbors, H840A, P475A, W476A, N477A, D1125A, W1126A, and D1218A mutations such that the polypeptide has a reduced ability to cleave a target DNA or RNA. Such a Cas9 protein has a reduced ability to cleave a target DNA (e.g., a single stranded target DNA) but retains the ability to bind a target DNA (e.g., a single stranded target DNA). As another non-limiting example, in some cases, the variant Cas9 protein harbors D10A, H840A, P475A, W476A, N477A, D1125A, W1126A, and D1218A mutations such that the polypeptide has a reduced ability to cleave a target DNA. Such a Cas9 protein has a reduced ability to cleave a target DNA (e.g., a single stranded target DNA) but retains the ability to bind a target DNA (e.g., a single stranded target DNA). In some cases, when a variant Cas9 protein harbors W476A and W1126A mutations or when the variant Cas9 protein harbors P475A, W476A, N477A, D1125A, W1126A, and D1218A mutations, the variant Cas9 protein does not bind efficiently to a PAM sequence. Thus, in some such cases, when such a variant Cas9 protein is used in a method of binding, the method does not require a PAM sequence. In other words, in some cases, when such a variant Cas9 protein is used in a method of binding, the method can include a guide RNA, but the method can be performed in the absence of a PAM sequence (and the specificity of binding is therefore provided by the targeting segment of the guide RNA). Other residues can be mutated to achieve the above effects (i.e., inactivate one or the other nuclease portions). As non-limiting examples, residues D10, G12, G17, E762, H840, N854, N863, H982, H983, A984, D986, and/or A987 can be altered (i.e., substituted). Also, mutations other than alanine substitutions are suitable.

[0350] In some embodiments, a CRISPR protein-derived domain of a base editor can comprise all or a portion of a Cas9 protein with a canonical PAM sequence (NGG). In other embodiments, a Cas9-derived domain of a base editor can employ a non-canonical PAM sequence. Such sequences have been described in the art and would be apparent to the skilled artisan. For example, Cas9 domains that bind non-canonical PAM sequences have been described in Kleinstiver, B. P., et al., “Engineered CRISPR-Cas9 nucleases with altered PAM specificities” Nature 523, 481-485 (2015); Kleinstiver, B. P., et al., “Broadening the targeting range of Staphylococcus aureus CRISPR-Cas9 by modifying PAM recognition” Nature Biotechnology 33, 1293-1298 (2015); R. T. Walton et al. “Unconstrained genome targeting with near-PAMless engineered CRISPR-Cas9 variants” Science 10.1126/science.aba8853 (2020); Hu et al. “Evolved Cas9 variants with broad PAM compatibility and high DNA specificity,” Nature, 2018 Apr. 5, 556(7699), 57-63; Miller et al., “Continuous evolution of SpCas9 variants compatible with non-G PAMs” Nat. Biotechnol., 2020 April; 38(4):471-481; the entire contents of each are hereby incorporated by reference.

Fusion Proteins Comprising a Cas9 Domain and a Cytidine Deaminase and/or Adenosine Deaminase

[0351] Some aspects of the disclosure provide fusion proteins comprising a Cas9 domain or other nucleic acid programmable DNA binding protein and one or more adenosine deaminase domain, cytidine deaminase domain, and/or DNA glycosylase domains. It should be appreciated that the Cas9 domain may be any of the Cas9 domains or Cas9 proteins (e.g., dCas9 or nCas9) provided herein. In some embodiments, any of the Cas9 domains or Cas9 proteins (e.g., dCas9 or nCas9) provided herein may be fused with any of the cytidine deaminases and adenosine deaminases provided herein. The domains of the base editors disclosed herein can be arranged in any order.

[0352] For example, and without limitation, in some embodiments, the fusion protein comprises the structure:

NH₂-[cytidine deaminase]-[Cas9 domain]-[adenosine deaminase]-COOH;
NH₂-[adenosine deaminase]-[Cas9 domain]-[cytidine deaminase]-COOH;
NH₂-[adenosine deaminase]-[cytidine deaminase]-[Cas9 domain]-COOH;
NH₂-[cytidine deaminase]-[adenosine deaminase]-[Cas9 domain]-COOH;
NH₂-[Cas9 domain]-[adenosine deaminase]-[cytidine deaminase]-COOH; or
NH₂-[Cas9 domain]-[cytidine deaminase]-[adenosine deaminase]-COOH.

[0353] In some embodiments, the adenosine deaminase of the fusion protein comprises a TadA*8 and a cytidine deaminase. In some embodiments, the TadA*8 is TadA*8.1, TadA*8.2, TadA*8.3, TadA*8.4, TadA*8.5, TadA*8.6, TadA*8.7, TadA*8.8, TadA*8.9, TadA*8.10, TadA*8.11, TadA*8.12, TadA*8.13, TadA*8.14, TadA*8.15, TadA*8.16, TadA*8.17, TadA*8.18, TadA*8.19, TadA*8.20, TadA*8.21, TadA*8.22, TadA*8.23, or TadA*8.24.

[0354] Exemplary fusion protein structures include the following:

NH₂-[adenosine deaminase]-[Cas9]-[cytidine deaminase]-COOH;
NH₂-[cytidine deaminase]-[Cas9]-[adenosine deaminase]-COOH;
NH₂-[TadA*8]-[Cas9]-[cytidine deaminase]-COOH; or
NH₂-[cytidine deaminase]-[Cas9]-[TadA*8]-COOH.

[0355] In some embodiments, the fusion proteins comprising a cytidine deaminase, abasic editor, and adenosine deaminase and a napDNAbp (e.g., Cas9 domain) do not include a linker sequence. In some embodiments, a linker is present between the cytidine deaminase and adenosine deaminase domains and the napDNAbp. In some embodiments, the “-” used in the general architecture above indicates the presence of an optional linker. In some embodiments, the cytidine deaminase and adenosine deaminase and the napDNAbp are fused via any of the linkers provided herein. For example, in some embodiments the cytidine deaminase and adenosine deaminase and the napDNAbp are fused via any of the linkers provided below in the section entitled “Linkers”.

[0356] In some embodiments, the general architecture of exemplary Cas9 or Cas12 fusion proteins with a cytidine deaminase, adenosine deaminase and a Cas9 or Cas12 domain comprises any one of the following structures, where NLS is a nuclear localization sequence (e.g., any NLS provided herein), NH₂ is the N-terminus of the fusion protein, and COOH is the C-terminus of the fusion protein.

[0357] NH₂-NLS-[cytidine deaminase]-[Cas9 domain]-[adenosine deaminase]-COOH;

[0358] NH₂-NLS-[adenosine deaminase]-[Cas9 domain]-[cytidine deaminase]-COOH;

[0359] NH₂-NLS-[adenosine deaminase] [cytidine deaminase]-[Cas9 domain]-COOH;

[0360] NH₂-NLS-[cytidine deaminase]-[adenosine deaminase]-[Cas9 domain]-COOH;

[0361] NH₂-NLS-[Cas9 domain]-[adenosine deaminase]-[cytidine deaminase]-COOH;

[0362] NH₂-NLS-[Cas9 domain]-[cytidine deaminase]-[adenosine deaminase]-COOH;

[0363] NH₂-[cytidine deaminase]-[Cas9 domain]-[adenosine deaminase]-NLS—COOH;

[0364] NH₂-[adenosine deaminase]-[Cas9 domain]-[cytidine deaminase]-NLS—COOH;

[0365] NH₂-[adenosine deaminase] [cytidine deaminase]-[Cas9 domain]-NLS—COOH;

[0366] NH₂-[cytidine deaminase]-[adenosine deaminase]-[Cas9 domain]-NLS—COOH;

[0367] NH₂-[Cas9 domain]-[adenosine deaminase]-[cytidine deaminase]-NLS—COOH; or

[0368] NH₂-[Cas9 domain]-[cytidine deaminase]-[adenosine deaminase]-NLS—COOH.

[0369] In some embodiments, the NLS is present in a linker or the NLS is flanked by linkers, for example described herein. In some embodiments, the N-terminus or C-terminus NLS is a bipartite NLS. A bipartite NLS comprises two basic amino acid clusters, which are separated by a relatively short spacer sequence (hence bipartite—2 parts, while monopartite NLSs are not). The NLS of nucleoplasmin, KR[PAATKKAGQA]KKKK, is the prototype of the ubiquitous bipartite signal: two clusters of basic amino acids, separated by a spacer of about 10 amino acids. The sequence of an exemplary bipartite NLS follows:

PKKKRKVEGADKRTADGSEFESPKKKRKV.

[0370] In some embodiments, the fusion proteins comprising a cytidine deaminase, adenosine deaminase, a Cas9 domain and an NLS do not comprise a linker sequence. In some embodiments, linker sequences between one or more of the domains or proteins (e.g., cytidine deaminase, adenosine deaminase, Cas9 domain or NLS) are present.

[0371] It should be appreciated that the fusion proteins of the present disclosure may comprise one or more additional features. For example, in some embodiments, the fusion protein may comprise inhibitors, cytoplasmic localization sequences, export sequences, such as nuclear export sequences, or other localization sequences, as well as sequence tags that are useful for solubilization, purification, or detection of the fusion proteins. Suitable protein tags provided herein include, but are not limited to, biotin carboxylase carrier protein (BCCP) tags, myc-tags, calmodulin-tags, FLAG-tags, hemagglutinin (HA)-tags, polyhistidine tags, also referred to as histidine tags or His-tags, maltose binding protein (MBP)-tags, nus-tags, glutathione-S-transferase (GST)-tags, green fluorescent protein (GFP)-tags, thioredoxin-tags, S-tags, Softags (e.g., Softag 1, Softag 3), strep-tags, biotin ligase tags, FlAsH tags, V5 tags, and SBP-tags. Additional suitable sequences will be apparent to those of skill in the art. In some embodiments, the fusion protein comprises one or more His tags.

[0372] Exemplary, yet nonlimiting, fusion proteins are described in International PCT Application Nos. PCT/2017/044935 and PCT/US2020/016288, each of which is incorporated herein by reference for its entirety.

### Fusion Proteins Comprising a Nuclear Localization Sequence (NLS)

[0373] In some embodiments, the fusion proteins provided herein further comprise one or more (e.g., 2, 3, 4, 5) nuclear targeting sequences, for example a nuclear localization sequence (NLS). In one embodiment, a bipartite NLS is used. In some embodiments, a NLS comprises an amino acid sequence that facilitates the importation of a protein, that comprises an NLS, into the cell nucleus (e.g., by nuclear transport). In some embodiments, any of the fusion proteins provided herein further comprise a nuclear localization sequence (NLS). In some embodiments, the NLS is fused to the N-terminus of the fusion protein. In some embodiments, the NLS is fused to the C-terminus of the fusion protein. In some embodiments, the NLS is fused to the N-terminus of the Cas9 domain. In some embodiments, the NLS is fused to the C-terminus of an nCas9 domain or a dCas9 domain. In some embodiments, the NLS is fused to the N-terminus of the deaminase. In some embodiments, the NLS is fused to the C-terminus of the deaminase. In some embodiments, the NLS is fused to the fusion protein via one or more linkers. In some embodiments, the NLS is fused to the fusion protein without a linker. In some embodiments, the NLS comprises an amino acid sequence of any one of the NLS sequences provided or referenced herein. Additional nuclear localization sequences are known in the art and would be apparent to the skilled artisan. For example, NLS sequences are described in Plank et al., PCT/EP2000/011690, the contents of which are incorporated herein by reference for their disclosure of exemplary nuclear localization sequences. In some embodiments, an NLS comprises the amino acid sequence PKKKRKVEGADKRTADGSEFES PKKKRKV, KRTADGSEFESPKKKRKV, KRPAATKKAGQAKKKK, KKTELQTTNAENKTKKL, KRGINDRNFWRGENGRKTR, RKSGKIAAIVVKRPRKPKKKRKV, or MDSLLMNRRKFLYQFKNVRWAKGRRETYLC. In some embodiments, the NLS is present in a linker or the NLS is flanked by linkers, for example, the linkers described herein. In some embodiments, the N-terminus or C-terminus NLS is a bipartite NLS. A bipartite NLS comprises two basic amino acid clusters, which are separated by a relatively short spacer sequence (hence bipartite—2 parts, while monopartite NLSs are not). The NLS of nucleoplasmin, KR [PAATKKAGQA] KKKK, is the prototype of the ubiquitous bipartite signal: two clusters of basic amino acids, separated by a spacer of about 10 amino acids. The sequence of an exemplary bipartite NLS follows: PKKKRKVEGADKRTADGSEFESPKKKRKV.

[0374] In some embodiments, the fusion proteins of the invention do not comprise a linker sequence. In some embodiments, linker sequences between one or more of the domains or proteins are present. In some embodiments, the general architecture of exemplary Cas9 fusion proteins with an adenosine deaminase or a cytidine deaminase and a Cas9 domain comprises any one of the following structures, where NLS is a nuclear localization sequence (e.g., any NLS provided herein), NH₂ is the N-terminus of the fusion protein, and COOH is the C-terminus of the fusion protein:

[0375] NH₂-NLS-[adenosine deaminase]-[Cas9 domain]-COOH;

[0376] NH₂-NLS [Cas9 domain]-[adenosine deaminase]-COOH;

[0377] NH₂-[adenosine deaminase]-[Cas9 domain]-NLS—COOH;

[0378] NH₂-[Cas9 domain]-[adenosine deaminase]-NLS—COOH;

[0379] NH₂-NLS-[cytidine deaminase]-[Cas9 domain]-COOH;

[0380] NH₂-NLS [Cas9 domain]-[cytidine deaminase]-COOH;

[0381] NH₂-[cytidine deaminase]-[Cas9 domain]-NLS—COOH; or

[0382] NH₂-[Cas9 domain]-[cytidine deaminase]-NLS—COOH.

[0383] It should be appreciated that the fusion proteins of the present disclosure may comprise one or more additional features. For example, in some embodiments, the fusion protein may comprise inhibitors, cytoplasmic localization sequences, export sequences, such as nuclear export sequences, or other localization sequences, as well as sequence tags that are useful for solubilization, purification, or detection of the fusion proteins. Suitable protein tags provided herein include, but are not limited to, biotin carboxylase carrier protein (BCCP) tags, myc-tags, calmodulin-tags, FLAG-tags, hemagglutinin (HA)-tags, polyhistidine tags, also referred to as histidine tags or His-tags, maltose binding protein (MBP)-tags, nus-tags, glutathione-S-transferase (GST)-tags, green fluorescent protein (GFP)-tags, thioredoxin-tags, S-tags, Softags (e.g., Softag 1, Softag 3), strep-tags, biotin ligase tags, FlAsH tags, V5 tags, and SBP-tags. Additional suitable sequences will be apparent to those of skill in the art. In some embodiments, the fusion protein comprises one or more His tags.

[0384] A vector that encodes a CRISPR enzyme comprising one or more nuclear localization sequences (NLSs) can be used. For example, there can be or be about 1, 2, 3, 4, 5, 6, 7, 8, 9, 10 NLSs used. A CRISPR enzyme can comprise the NLSs at or near the ammo-terminus, about or more than about 1, 2, 3, 4, 5, 6, 7, 8, 9, 10 NLSs at or near the carboxy-terminus, or any combination of these (e.g., one or more NLS at the ammo-terminus and one or more NLS at the carboxy terminus). When more than one NLS is present, each can be selected independently of others, such that a single NLS can be present in more than one copy and/or in combination with one or more other NLSs present in one or more copies.

[0385] CRISPR enzymes used in the methods can comprise about 6 NLSs. An NLS is considered near the N- or C-terminus when the nearest amino acid to the NLS is within about 50 amino acids along a polypeptide chain from the N- or C-terminus, e.g., within 1, 2, 3, 4, 5, 10, 15, 20, 25, 30, 40, or 50 amino acids.

Fusion Proteins with Internal Insertions

[0386] Provided herein are fusion proteins comprising a heterologous polypeptide fused to a nucleic acid programmable nucleic acid binding protein, for example, a napDNAbp. A heterologous polypeptide can be a polypeptide that is not found in the native or wild-type napDNAbp polypeptide sequence. The heterologous polypeptide can be fused to the napDNAbp at a C-terminal end of the napDNAbp, an N-terminal end of the napDNAbp, or inserted at an internal location of the napDNAbp. In some embodiments, the heterologous polypeptide is inserted at an internal location of the napDNAbp.

[0387] In some embodiments, the heterologous polypeptide is a deaminase or a functional fragment thereof. For example, a fusion protein can comprise a deaminase flanked by an N-terminal fragment and a C-terminal fragment of a Cas9 or Cas12 (e.g., Cas12b/C2c1), polypeptide. The deaminase in a fusion protein can be an adenosine deaminase. In some embodiments, the adenosine deaminase is a TadA (e.g., TadA7.10 or TadA*8). In some embodiments, the TadA is a TadA*8. TadA sequences (e.g., TadA7.10 or TadA*8) as described herein are suitable deaminases for the above-described fusion proteins.

[0388] The deaminase can be a circular permutant deaminase. For example, the deaminase can be a circular permutant adenosine deaminase. In some embodiments, the deaminase is a circular permutant TadA, circularly permutated at amino acid residue 116 as numbered in the TadA reference sequence. In some embodiments, the deaminase is a circular permutant TadA, circularly permutated at amino acid residue 136 as numbered in the TadA reference sequence. In some embodiments, the deaminase is a circular permutant TadA, circularly permutated at amino acid residue 65 as numbered in the TadA reference sequence.

[0389] The fusion protein can comprise more than one deaminase. The fusion protein can comprise, for example, 1, 2, 3, 4, 5 or more deaminases. In some embodiments, the fusion protein comprises one deaminase. In some embodiments, the fusion protein comprises two deaminases. The two or more deaminases in a fusion protein can be an adenosine deaminase. cytidine deaminase, or a combination thereof. The two or more deaminases can be homodimers. The two or more deaminases can be heterodimers. The two or more deaminases can be inserted in tandem in the napDNAbp. In some embodiments, the two or more deaminases may not be in tandem in the napDNAbp.

[0390] In some embodiments, the napDNAbp in the fusion protein is a Cas9 polypeptide or a fragment thereof. The Cas9 polypeptide can be a variant Cas9 polypeptide. In some embodiments, the Cas9 polypeptide is a Cas9 nickase (nCas9) polypeptide or a fragment thereof. In some embodiments, the Cas9 polypeptide is a nuclease dead Cas9 (dCas9) polypeptide or a fragment thereof. The Cas9 polypeptide in a fusion protein can be a full-length Cas9 polypeptide. In some cases, the Cas9 polypeptide in a fusion protein may not be a full length Cas9 polypeptide. The Cas9 polypeptide can be truncated, for example, at a N-terminal or C-terminal end relative to a naturally-occurring Cas9 protein. The Cas9 polypeptide can be a circularly permuted Cas9 protein. The Cas9 polypeptide can be a fragment, a portion, or a domain of a Cas9 polypeptide, that is still capable of binding the target polynucleotide and a guide nucleic acid sequence.

[0391] In some embodiments, the Cas9 polypeptide is a Streptococcus pyogenes Cas9 (SpCas9), Staphylococcus aureus Cas9 (SaCas9), Streptococcus thermophilus 1 Cas9 (St1Cas9), or fragments or variants thereof.

[0392] The Cas9 polypeptide of a fusion protein can comprise an amino acid sequence that is at least 85%, at least 90%, at least 91%, at least 92%, at least 93%, at least 94%, at least 95%, at least 96%, at least 97%, at least 98%, at least 99%, or at least 99.5% identical to a naturally-occurring Cas9 polypeptide.

[0393] The Cas9 polypeptide of a fusion protein can comprise an amino acid sequence that is at least 85%, at least 90%, at least 91%, at least 92%, at least 93%, at least 94%, at least 95%, at least 96%, at least 97%, at least 98%, at least 99%, or at least 99.5% identical to the Cas9 amino acid sequence set forth below (called the “Cas9 reference sequence” below):

[sequence omitted]

(single underline: HNH domain; double underline: RuvC domain).

[0394] Fusion proteins comprising a heterologous catalytic domain flanked by N- and C-terminal fragments of a Cas9 polypeptide are also useful for base editing in the methods as described herein. Fusion proteins comprising Cas9 and one or more deaminase domains, e.g., adenosine deaminase, or comprising an adenosine deaminase domain flanked by Cas9 sequences are also useful for highly specific and efficient base editing of target sequences. In an embodiment, a chimeric Cas9 fusion protein contains a heterologous catalytic domain (e.g., adenosine deaminase, cytidine deaminase, or adenosine deaminase and cytidine deaminase) inserted within a Cas9 polypeptide. In some embodiments, the fusion protein comprises an adenosine deaminase domain and a cytidine deaminase domain inserted within a Cas9. In some embodiments, an adenosine deaminase is fused within a Cas9 and a cytidine deaminase is fused to the C-terminus. In some embodiments, an adenosine deaminase is fused within Cas9 and a cytidine deaminase fused to the N-terminus. In some embodiments, a cytidine deaminase is fused within Cas9 and an adenosine deaminase is fused to the C-terminus. In some embodiments, a cytidine deaminase is fused within Cas9 and an adenosine deaminase fused to the N-terminus.

[0395] Exemplary structures of a fusion protein with an adenosine deaminase and a cytidine deaminase and a Cas9 are provided as follows:

[0396] NH₂-[Cas9(adenosine deaminase)]-[cytidine deaminase]-COOH;

[0397] NH₂-[cytidine deaminase]-[Cas9(adenosine deaminase)]-COOH;

[0398] NH₂-[Cas9(cytidine deaminase)]-[adenosine deaminase]-COOH; or

[0399] NH₂-[adenosine deaminase]-[Cas9(cytidine deaminase)]-COOH.

In some embodiments, the “-” used in the general architecture above indicates the presence of an optional linker.

[0400] In various embodiments, the catalytic domain has DNA modifying activity (e.g., deaminase activity), such as adenosine deaminase activity. In some embodiments, the adenosine deaminase is a TadA (e.g., TadA7.10). In some embodiments, the TadA is a TadA*8. In some embodiments, a TadA*8 is fused within Cas9 and a cytidine deaminase is fused to the C-terminus. In some embodiments, a TadA*8 is fused within Cas9 and a cytidine deaminase fused to the N-terminus. In some embodiments, a cytidine deaminase is fused within Cas9 and a TadA*8 is fused to the C-terminus. In some embodiments, a cytidine deaminase is fused within Cas9 and a TadA*8 fused to the N-terminus. Exemplary structures of a fusion protein with a TadA*8 and a cytidine deaminase and a Cas9 are provided as follows:

[0401] NH₂-[Cas9(TadA*8)]-[cytidine deaminase]-COOH;

[0402] NH₂-[cytidine deaminase]-[Cas9(TadA*8)]-COOH;

[0403] NH₂-[Cas9(cytidine deaminase)]-[TadA*8]-COOH; or

[0404] NH₂-[TadA*8]-[Cas9(cytidine deaminase)]-COOH.

In some embodiments, the “-” used in the general architecture above indicates the presence of an optional linker.

[0405] The heterologous polypeptide (e.g., deaminase) can be inserted in the napDNAbp (e.g., Cas9 or Cas12 (e.g., Cas12b/C2c1)) at a suitable location, for example, such that the napDNAbp retains its ability to bind the target polynucleotide and a guide nucleic acid. A deaminase (e.g., adenosine deaminase, cytidine deaminase, or adenosine deaminase and cytidine deaminase) can be inserted into a napDNAbp without compromising function of the deaminase (e.g., base editing activity) or the napDNAbp (e.g., ability to bind to target nucleic acid and guide nucleic acid). A deaminase (e.g., adenosine deaminase, cytidine deaminase, or adenosine deaminase and cytidine deaminase) can be inserted in the napDNAbp at, for example, a disordered region or a region comprising a high temperature factor or B-factor as shown by crystallographic studies. Regions of a protein that are less ordered, disordered, or unstructured, for example solvent exposed regions and loops, can be used for insertion without compromising structure or function. A deaminase (e.g., adenosine deaminase, cytidine deaminase, or adenosine deaminase and cytidine deaminase) can be inserted in the napDNAbp in a flexible loop region or a solvent-exposed region. In some embodiments, the deaminase (e.g., adenosine deaminase, cytidine deaminase, or adenosine deaminase and cytidine deaminase) is inserted in a flexible loop of the Cas9 or the Cas12b/C2c1 polypeptide.

[0406] In some embodiments, the insertion location of a deaminase (e.g., adenosine deaminase, cytidine deaminase, or adenosine deaminase and cytidine deaminase) is determined by B-factor analysis of the crystal structure of Cas9 polypeptide. In some embodiments, the deaminase (e.g., adenosine deaminase, cytidine deaminase, or adenosine deaminase and cytidine deaminase) is inserted in regions of the Cas9 polypeptide comprising higher than average B-factors (e.g., higher B factors compared to the total protein or the protein domain comprising the disordered region). B-factor or temperature factor can indicate the fluctuation of atoms from their average position (for example, as a result of temperature-dependent atomic vibrations or static disorder in a crystal lattice). A high B-factor (e.g., higher than average B-factor) for backbone atoms can be indicative of a region with relatively high local mobility. Such a region can be used for inserting a deaminase without compromising structure or function. A deaminase (e.g., adenosine deaminase, cytidine deaminase, or adenosine deaminase and cytidine deaminase) can be inserted at a location with a residue having a Ca atom with a B-factor that is 50%, 60%, 70%, 80%, 90%, 100%, 110%, 120%, 130%, 140%, 150%, 160%, 170%, 180%, 190%, 200%, or greater than 200% more than the average B-factor for the total protein. A deaminase (e.g., adenosine deaminase, cytidine deaminase, or adenosine deaminase and cytidine deaminase) can be inserted at a location with a residue having a Ca atom with a B-factor that is 50%, 60%, 70%, 80%, 90%, 100%, 110%, 120%, 130%, 140%, 150%, 160%, 170%, 180%, 190%, 200% or greater than 200% more than the average B-factor for a Cas9 protein domain comprising the residue. Cas9 polypeptide positions comprising a higher than average B-factor can include, for example, residues 768, 792, 1052, 1015, 1022, 1026, 1029, 1067, 1040, 1054, 1068, 1246, 1247, and 1248 as numbered in the above Cas9 reference sequence. Cas9 polypeptide regions comprising a higher than average B-factor can include, for example, residues 792-872, 792-906, and 2-791 as numbered in the above Cas9 reference sequence.

[0407] A heterologous polypeptide (e.g., deaminase) can be inserted in the napDNAbp at an amino acid residue selected from the group consisting of: 768, 791, 792, 1015, 1016, 1022, 1023, 1026, 1029, 1040, 1052, 1054, 1067, 1068, 1069, 1246, 1247, and 1248 as numbered in the above Cas9 reference sequence, or a corresponding amino acid residue in another Cas9 polypeptide. In some embodiments, the heterologous polypeptide is inserted between amino acid positions 768-769, 791-792, 792-793, 1015-1016, 1022-1023, 1026-1027, 1029-1030, 1040-1041, 1052-1053, 1054-1055, 1067-1068, 1068-1069, 1247-1248, or 1248-1249 as numbered in the above Cas9 reference sequence or corresponding amino acid positions thereof. In some embodiments, the heterologous polypeptide is inserted between amino acid positions 769-770, 792-793, 793-794, 1016-1017, 1023-1024, 1027-1028, 1030-1031, 1041-1042, 1053-1054, 1055-1056, 1068-1069, 1069-1070, 1248-1249, or 1249-1250 as numbered in the above Cas9 reference sequence or corresponding amino acid positions thereof. In some embodiments, the heterologous polypeptide replaces an amino acid residue selected from the group consisting of: 768, 791, 792, 1015, 1016, 1022, 1023, 1026, 1029, 1040, 1052, 1054, 1067, 1068, 1069, 1246, 1247, and 1248 as numbered in the above Cas9 reference sequence, or a corresponding amino acid residue in another Cas9 polypeptide. It should be understood that the reference to the above Cas9 reference sequence with respect to insertion positions is for illustrative purposes. The insertions as discussed herein are not limited to the Cas9 polypeptide sequence of the above Cas9 reference sequence, but include insertion at corresponding locations in variant Cas9 polypeptides, for example a Cas9 nickase (nCas9), nuclease dead Cas9 (dCas9), a Cas9 variant lacking a nuclease domain, a truncated Cas9, or a Cas9 domain lacking partial or complete HNH domain.

[0408] A heterologous polypeptide (e.g., deaminase) can be inserted in the napDNAbp at an amino acid residue selected from the group consisting of: 768, 792, 1022, 1026, 1040, 1068, and 1247 as numbered in the above Cas9 reference sequence, or a corresponding amino acid residue in another Cas9 polypeptide. In some embodiments, the heterologous polypeptide is inserted between amino acid positions 768-769, 792-793, 1022-1023, 1026-1027, 1029-1030, 1040-1041, 1068-1069, or 1247-1248 as numbered in the above Cas9 reference sequence or corresponding amino acid positions thereof. In some embodiments, the heterologous polypeptide is inserted between amino acid positions 769-770, 793-794, 1023-1024, 1027-1028, 1030-1031, 1041-1042, 1069-1070, or 1248-1249 as numbered in the above Cas9 reference sequence or corresponding amino acid positions thereof. In some embodiments, the heterologous polypeptide replaces an amino acid residue selected from the group consisting of: 768, 792, 1022, 1026, 1040, 1068, and 1247 as numbered in the above Cas9 reference sequence, or a corresponding amino acid residue in another Cas9 polypeptide.

[0409] A heterologous polypeptide (e.g., deaminase) can be inserted in the napDNAbp at an amino acid residue as described herein, or a corresponding amino acid residue in another Cas9 polypeptide. In an embodiment, a heterologous polypeptide (e.g., deaminase) can be inserted in the napDNAbp at an amino acid residue selected from the group consisting of: 1002, 1003, 1025, 1052-1056, 1242-1247, 1061-1077, 943-947, 686-691, 569-578, 530-539, and 1060-1077 as numbered in the above Cas9 reference sequence, or a corresponding amino acid residue in another Cas9 polypeptide. The deaminase (e.g., adenosine deaminase, cytidine deaminase, or adenosine deaminase and cytidine deaminase) can be inserted at the N-terminus or the C-terminus of the residue or replace the residue. In some embodiments, the deaminase (e.g., adenosine deaminase, cytidine deaminase, or adenosine deaminase and cytidine deaminase) is inserted at the C-terminus of the residue.

[0410] In some embodiments, an adenosine deaminase (e.g., TadA) is inserted at an amino acid residue selected from the group consisting of: 1015, 1022, 1029, 1040, 1068, 1247, 1054, 1026, 768, 1067, 1248, 1052, and 1246 as numbered in the above Cas9 reference sequence, or a corresponding amino acid residue in another Cas9 polypeptide. In some embodiments, an adenosine deaminase (e.g., TadA) is inserted in place of residues 792-872, 792-906, or 2-791 as numbered in the above Cas9 reference sequence, or a corresponding amino acid residue in another Cas9 polypeptide. In some embodiments, the adenosine deaminase is inserted at the N-terminus of an amino acid selected from the group consisting of: 1015, 1022, 1029, 1040, 1068, 1247, 1054, 1026, 768, 1067, 1248, 1052, and 1246 as numbered in the above Cas9 reference sequence, or a corresponding amino acid residue in another Cas9 polypeptide. In some embodiments, the adenosine deaminase is inserted at the C-terminus of an amino acid selected from the group consisting of: 1015, 1022, 1029, 1040, 1068, 1247, 1054, 1026, 768, 1067, 1248, 1052, and 1246 as numbered in the above Cas9 reference sequence, or a corresponding amino acid residue in another Cas9 polypeptide. In some embodiments, the adenosine deaminase is inserted to replace an amino acid selected from the group consisting of: 1015, 1022, 1029, 1040, 1068, 1247, 1054, 1026, 768, 1067, 1248, 1052, and 1246 as numbered in the above Cas9 reference sequence, or a corresponding amino acid residue in another Cas9 polypeptide.

[0411] In some embodiments, a CBE (e.g., APOBEC1) is inserted at an amino acid residue selected from the group consisting of: 1016, 1023, 1029, 1040, 1069, and 1247 as numbered in the above Cas9 reference sequence, or a corresponding amino acid residue in another Cas9 polypeptide. In some embodiments, the ABE is inserted at the N-terminus of an amino acid selected from the group consisting of: 1016, 1023, 1029, 1040, 1069, and 1247 as numbered in the above Cas9 reference sequence, or a corresponding amino acid residue in another Cas9 polypeptide. In some embodiments, the ABE is inserted at the C-terminus of an amino acid selected from the group consisting of: 1016, 1023, 1029, 1040, 1069, and 1247 as numbered in the above Cas9 reference sequence, or a corresponding amino acid residue in another Cas9 polypeptide. In some embodiments, the ABE is inserted to replace an amino acid selected from the group consisting of: 1016, 1023, 1029, 1040, 1069, and 1247 as numbered in the above Cas9 reference sequence, or a corresponding amino acid residue in another Cas9 polypeptide.

[0412] In some embodiments, the deaminase (e.g., adenosine deaminase, cytidine deaminase, or adenosine deaminase and cytidine deaminase) is inserted at amino acid residue 768 as numbered in the above Cas9 reference sequence, or a corresponding amino acid residue in another Cas9 polypeptide. In some embodiments, the deaminase (e.g., adenosine deaminase, cytidine deaminase, or adenosine deaminase and cytidine deaminase) is inserted at the N-terminus of amino acid residue 768 as numbered in the above Cas9 reference sequence, or a corresponding amino acid residue in another Cas9 polypeptide. In some embodiments, the deaminase (e.g., adenosine deaminase, cytidine deaminase, or adenosine deaminase and cytidine deaminase) is inserted at the C-terminus of amino acid residue 768 as numbered in the above Cas9 reference sequence, or a corresponding amino acid residue in another Cas9 polypeptide. In some embodiments, the deaminase (e.g., adenosine deaminase, cytidine deaminase, or adenosine deaminase and cytidine deaminase) is inserted to replace amino acid residue 768 as numbered in the above Cas9 reference sequence, or a corresponding amino acid residue in another Cas9 polypeptide.

[0413] In some embodiments, the deaminase (e.g., adenosine deaminase, cytidine deaminase, or adenosine deaminase and cytidine deaminase) is inserted at amino acid residue 791 or is inserted at amino acid residue 792, as numbered in the above Cas9 reference sequence, or a corresponding amino acid residue in another Cas9 polypeptide. In some embodiments, the deaminase (e.g., adenosine deaminase, cytidine deaminase, or adenosine deaminase and cytidine deaminase) is inserted at the N-terminus of amino acid residue 791 or is inserted at the N-terminus of amino acid 792, as numbered in the above Cas9 reference sequence, or a corresponding amino acid residue in another Cas9 polypeptide. In some embodiments, the deaminase (e.g., adenosine deaminase, cytidine deaminase, or adenosine deaminase and cytidine deaminase) is inserted at the C-terminus of amino acid 791 or is inserted at the N-terminus of amino acid 792, as numbered in the above Cas9 reference sequence, or a corresponding amino acid residue in another Cas9 polypeptide. In some embodiments, the deaminase (e.g., adenosine deaminase, cytidine deaminase, or adenosine deaminase and cytidine deaminase) is inserted to replace amino acid 791, or is inserted to replace amino acid 792, as numbered in the above Cas9 reference sequence, or a corresponding amino acid residue in another Cas9 polypeptide.

[0414] In some embodiments, the deaminase (e.g., adenosine deaminase, cytidine deaminase, or adenosine deaminase and cytidine deaminase) is inserted at amino acid residue 1016 as numbered in the above Cas9 reference sequence, or a corresponding amino acid residue in another Cas9 polypeptide. In some embodiments, the deaminase (e.g., adenosine deaminase, cytidine deaminase, or adenosine deaminase and cytidine deaminase) is inserted at the N-terminus of amino acid residue 1016 as numbered in the above Cas9 reference sequence, or a corresponding amino acid residue in another Cas9 polypeptide. In some embodiments, the deaminase (e.g., adenosine deaminase, cytidine deaminase, or adenosine deaminase and cytidine deaminase) is inserted at the C-terminus of amino acid residue 1016 as numbered in the above Cas9 reference sequence, or a corresponding amino acid residue in another Cas9 polypeptide. In some embodiments, the deaminase (e.g., adenosine deaminase, cytidine deaminase, or adenosine deaminase and cytidine deaminase) is inserted to replace amino acid residue 1016 as numbered in the above Cas9 reference sequence, or a corresponding amino acid residue in another Cas9 polypeptide.

[0415] In some embodiments, the deaminase (e.g., adenosine deaminase, cytidine deaminase, or adenosine deaminase and cytidine deaminase) is inserted at amino acid residue 1022, or is inserted at amino acid residue 1023, as numbered in the above Cas9 reference sequence, or a corresponding amino acid residue in another Cas9 polypeptide. In some embodiments, the deaminase (e.g., adenosine deaminase, cytidine deaminase, or adenosine deaminase and cytidine deaminase) is inserted at the N-terminus of amino acid residue 1022 or is inserted at the N-terminus of amino acid residue 1023, as numbered in the above Cas9 reference sequence, or a corresponding amino acid residue in another Cas9 polypeptide. In some embodiments, the deaminase (e.g., adenosine deaminase, cytidine deaminase, or adenosine deaminase and cytidine deaminase) is inserted at the C-terminus of amino acid residue 1022 or is inserted at the C-terminus of amino acid residue 1023, as numbered in the above Cas9 reference sequence, or a corresponding amino acid residue in another Cas9 polypeptide. In some embodiments, the deaminase (e.g., adenosine deaminase, cytidine deaminase, or adenosine deaminase and cytidine deaminase) is inserted to replace amino acid residue 1022, or is inserted to replace amino acid residue 1023, as numbered in the above Cas9 reference sequence, or a corresponding amino acid residue in another Cas9 polypeptide.

[0416] In some embodiments, the deaminase (e.g., adenosine deaminase, cytidine deaminase, or adenosine deaminase and cytidine deaminase) is inserted at amino acid residue 1026, or is inserted at amino acid residue 1029, as numbered in the above Cas9 reference sequence, or a corresponding amino acid residue in another Cas9 polypeptide. In some embodiments, the deaminase (e.g., adenosine deaminase, cytidine deaminase, or adenosine deaminase and cytidine deaminase) is inserted at the N-terminus of amino acid residue 1026 or is inserted at the N-terminus of amino acid residue 1029, as numbered in the above Cas9 reference sequence, or a corresponding amino acid residue in another Cas9 polypeptide. In some embodiments, the deaminase (e.g., adenosine deaminase, cytidine deaminase, or adenosine deaminase and cytidine deaminase) is inserted at the C-terminus of amino acid residue 1026 or is inserted at the C-terminus of amino acid residue 1029, as numbered in the above Cas9 reference sequence, or a corresponding amino acid residue in another Cas9 polypeptide. In some embodiments, the deaminase (e.g., adenosine deaminase, cytidine deaminase, or adenosine deaminase and cytidine deaminase) is inserted to replace amino acid residue 1026, or is inserted to replace amino acid residue 1029, as numbered in the above Cas9 reference sequence, or corresponding amino acid residue in another Cas9 polypeptide.

[0417] In some embodiments, the deaminase (e.g., adenosine deaminase, cytidine deaminase, or adenosine deaminase and cytidine deaminase) is inserted at amino acid residue 1040 as numbered in the above Cas9 reference sequence, or a corresponding amino acid residue in another Cas9 polypeptide. In some embodiments, the deaminase (e.g., adenosine deaminase, cytidine deaminase, or adenosine deaminase and cytidine deaminase) is inserted at the N-terminus of amino acid residue 1040 as numbered in the above Cas9 reference sequence, or a corresponding amino acid residue in another Cas9 polypeptide. In some embodiments, the deaminase (e.g., adenosine deaminase, cytidine deaminase, or adenosine deaminase and cytidine deaminase) is inserted at the C-terminus of amino acid residue 1040 as numbered in the above Cas9 reference sequence, or a corresponding amino acid residue in another Cas9 polypeptide. In some embodiments, the deaminase (e.g., adenosine deaminase, cytidine deaminase, or adenosine deaminase and cytidine deaminase) is inserted to replace amino acid residue 1040 as numbered in the above Cas9 reference sequence, or a corresponding amino acid residue in another Cas9 polypeptide.

[0418] In some embodiments, the deaminase (e.g., adenosine deaminase, cytidine deaminase, or adenosine deaminase and cytidine deaminase) is inserted at amino acid residue 1052, or is inserted at amino acid residue 1054, as numbered in the above Cas9 reference sequence, or a corresponding amino acid residue in another Cas9 polypeptide. In some embodiments, the deaminase (e.g., adenosine deaminase, cytidine deaminase, or adenosine deaminase and cytidine deaminase) is inserted at the N-terminus of amino acid residue 1052 or is inserted at the N-terminus of amino acid residue 1054, as numbered in the above Cas9 reference sequence, or a corresponding amino acid residue in another Cas9 polypeptide. In some embodiments, the deaminase (e.g., adenosine deaminase, cytidine deaminase, or adenosine deaminase and cytidine deaminase) is inserted at the C-terminus of amino acid residue 1052 or is inserted at the C-terminus of amino acid residue 1054, as numbered in the above Cas9 reference sequence, or a corresponding amino acid residue in another Cas9 polypeptide. In some embodiments, the deaminase (e.g., adenosine deaminase, cytidine deaminase, or adenosine deaminase and cytidine deaminase) is inserted to replace amino acid residue 1052, or is inserted to replace amino acid residue 1054, as numbered in the above Cas9 reference sequence, or a corresponding amino acid residue in another Cas9 polypeptide.

[0419] In some embodiments, the deaminase (e.g., adenosine deaminase, cytidine deaminase, or adenosine deaminase and cytidine deaminase) is inserted at amino acid residue 1067, or is inserted at amino acid residue 1068, or is inserted at amino acid residue 1069, as numbered in the above Cas9 reference sequence, or a corresponding amino acid residue in another Cas9 polypeptide. In some embodiments, the deaminase (e.g., adenosine deaminase, cytidine deaminase, or adenosine deaminase and cytidine deaminase) is inserted at the N-terminus of amino acid residue 1067 or is inserted at the N-terminus of amino acid residue 1068 or is inserted at the N-terminus of amino acid residue 1069, as numbered in the above Cas9 reference sequence, or a corresponding amino acid residue in another Cas9 polypeptide. In some embodiments, the deaminase (e.g., adenosine deaminase, cytidine deaminase, or adenosine deaminase and cytidine deaminase) is inserted at the C-terminus of amino acid residue 1067 or is inserted at the C-terminus of amino acid residue 1068 or is inserted at the C-terminus of amino acid residue 1069, as numbered in the above Cas9 reference sequence, or a corresponding amino acid residue in another Cas9 polypeptide. In some embodiments, the deaminase (e.g., adenosine deaminase, cytidine deaminase, or adenosine deaminase and cytidine deaminase) is inserted to replace amino acid residue 1067, or is inserted to replace amino acid residue 1068, or is inserted to replace amino acid residue 1069, as numbered in the above Cas9 reference sequence, or a corresponding amino acid residue in another Cas9 polypeptide.

[0420] In some embodiments, the deaminase (e.g., adenosine deaminase, cytidine deaminase, or adenosine deaminase and cytidine deaminase) is inserted at amino acid residue 1246, or is inserted at amino acid residue 1247, or is inserted at amino acid residue 1248, as numbered in the above Cas9 reference sequence, or a corresponding amino acid residue in another Cas9 polypeptide. In some embodiments, the deaminase (e.g., adenosine deaminase, cytidine deaminase, or adenosine deaminase and cytidine deaminase) is inserted at the N-terminus of amino acid residue 1246 or is inserted at the N-terminus of amino acid residue 1247 or is inserted at the N-terminus of amino acid residue 1248, as numbered in the above Cas9 reference sequence, or a corresponding amino acid residue in another Cas9 polypeptide. In some embodiments, the deaminase (e.g., adenosine deaminase, cytidine deaminase, or adenosine deaminase and cytidine deaminase) is inserted at the C-terminus of amino acid residue 1246 or is inserted at the C-terminus of amino acid residue 1247 or is inserted at the C-terminus of amino acid residue 1248, as numbered in the above Cas9 reference sequence, or a corresponding amino acid residue in another Cas9 polypeptide. In some embodiments, the deaminase (e.g., adenosine deaminase, cytidine deaminase, or adenosine deaminase and cytidine deaminase) is inserted to replace amino acid residue 1246, or is inserted to replace amino acid residue 1247, or is inserted to replace amino acid residue 1248, as numbered in the above Cas9 reference sequence, or a corresponding amino acid residue in another Cas9 polypeptide.

[0421] In some embodiments, a heterologous polypeptide (e.g., deaminase) is inserted in a flexible loop of a Cas9 polypeptide. The flexible loop portions can be selected from the group consisting of 530-537, 569-570, 686-691, 943-947, 1002-1025, 1052-1077, 1232-1247, or 1298-1300 as numbered in the above Cas9 reference sequence, or a corresponding amino acid residue in another Cas9 polypeptide. The flexible loop portions can be selected from the group consisting of: 1-529, 538-568, 580-685, 692-942, 948-1001, 1026-1051, 1078-1231, or 1248-1297 as numbered in the above Cas9 reference sequence, or a corresponding amino acid residue in another Cas9 polypeptide.

[0422] A heterologous polypeptide (e.g., adenine deaminase) can be inserted into a Cas9 polypeptide region corresponding to amino acid residues: 1017-1069, 1242-1247, 1052-1056, 1060-1077, 1002-1003, 943-947, 530-537, 568-579, 686-691, 1242-1247, 1298-1300, 1066-1077, 1052-1056, or 1060-1077 as numbered in the above Cas9 reference sequence, or a corresponding amino acid residue in another Cas9 polypeptide.

[0423] A heterologous polypeptide (e.g., adenine deaminase) can be inserted in place of a deleted region of a Cas9 polypeptide. The deleted region can correspond to an N-terminal or C-terminal portion of the Cas9 polypeptide. In some embodiments, the deleted region corresponds to residues 792-872 as numbered in the above Cas9 reference sequence, or a corresponding amino acid residue in another Cas9 polypeptide. In some embodiments, the deleted region corresponds to residues 792-906 as numbered in the above Cas9 reference sequence, or a corresponding amino acid residue in another Cas9 polypeptide. In some embodiments, the deleted region corresponds to residues 2-791 as numbered in the above Cas9 reference sequence, or a corresponding amino acid residue in another Cas9 polypeptide. In some embodiments, the deleted region corresponds to residues 1017-1069 as numbered in the above Cas9 reference sequence, or corresponding amino acid residues thereof.

[0424] Exemplary internal fusions base editors are provided in Table 6 below:

TABLE 6
Insertion loci in Cas9 proteins

| BE ID | Modification | Other ID |
|---|---|---|
| IBE001 | Cas9 TadA ins 1015 | ISLAY01 |
| IBE002 | Cas9 TadA ins 1022 | ISLAY02 |
| IBE003 | Cas9 TadA ins 1029 | ISLAY03 |
| IBE004 | Cas9 TadA ins 1040 | ISLAY04 |
| IBE005 | Cas9 TadA ins 1068 | ISLAY05 |
| IBE006 | Cas9 TadA ins 1247 | ISLAY06 |
| IBE007 | Cas9 TadA ins 1054 | ISLAY07 |
| IBE008 | Cas9 TadA ins 1026 | ISLAY08 |
| IBE009 | Cas9 TadA ins 768 | ISLAY09 |
| IBE020 | delta HNH TadA 792 | ISLAY20 |
| IBE021 | N-term fusion single | ISLAY21 |
| | TadA helix truncated 165-end | |
| IBE029 | TadA-Circular Permutant 116 ins 1067 | ISLAY29 |
| IBE031 | TadA-Circular Permutant 136 ins 1248 | ISLAY31 |
| IBE032 | TadA-Circular Permutant 136 ins 1052 | ISLAY32 |
| IBE035 | delta 792-872 TadA ins | ISLAY35 |
| IBE036 | delta 792-906 TadA ins | ISLAY36 |
| IBE043 | TadA-Circular Permutant 65 ins 1246 | ISLAY43 |
| IBE044 | TadA ins C-term truncate 2791 | ISLAY44 |

[0425] A heterologous polypeptide (e.g., deaminase) can be inserted within a structural or functional domain of a Cas9 polypeptide. A heterologous polypeptide (e.g., deaminase) can be inserted between two structural or functional domains of a Cas9 polypeptide. A heterologous polypeptide (e.g., deaminase) can be inserted in place of a structural or functional domain of a Cas9 polypeptide, for example, after deleting the domain from the Cas9 polypeptide. The structural or functional domains of a Cas9 polypeptide can include, for example, RuvC I, RuvC II, RuvC III, Rec1, Rec2, PI, or HNH.

[0426] In some embodiments, the Cas9 polypeptide lacks one or more domains selected from the group consisting of: RuvC I, RuvC II, RuvC III, Rec1, Rec2, PI, or HNH domain. In some embodiments, the Cas9 polypeptide lacks a nuclease domain. In some embodiments, the Cas9 polypeptide lacks an HNH domain. In some embodiments, the Cas9 polypeptide lacks a portion of the HNH domain such that the Cas9 polypeptide has reduced or abolished HNH activity. In some embodiments, the Cas9 polypeptide comprises a deletion of the nuclease domain, and the deaminase is inserted to replace the nuclease domain. In some embodiments, the HNH domain is deleted and the deaminase is inserted in its place. In some embodiments, one or more of the RuvC domains is deleted and the deaminase is inserted in its place.

[0427] A fusion protein comprising a heterologous polypeptide can be flanked by a N-terminal and a C-terminal fragment of a napDNAbp. In some embodiments, the fusion protein comprises a deaminase flanked by a N-terminal fragment and a C-terminal fragment of a Cas9 polypeptide. The N terminal fragment or the C terminal fragment can bind the target polynucleotide sequence. The C-terminus of the N terminal fragment or the N-terminus of the C terminal fragment can comprise a part of a flexible loop of a Cas9 polypeptide. The C-terminus of the N terminal fragment or the N-terminus of the C terminal fragment can comprise a part of an alpha-helix structure of the Cas9 polypeptide. The N-terminal fragment or the C-terminal fragment can comprise a DNA binding domain. The N-terminal fragment or the C-terminal fragment can comprise a RuvC domain. The N-terminal fragment or the C-terminal fragment can comprise an HNH domain. In some embodiments, neither of the N-terminal fragment and the C-terminal fragment comprises an HNH domain.

[0428] In some embodiments, the C-terminus of the N terminal Cas9 fragment comprises an amino acid that is in proximity to a target nucleobase when the fusion protein deaminates the target nucleobase. In some embodiments, the N-terminus of the C terminal Cas9 fragment comprises an amino acid that is in proximity to a target nucleobase when the fusion protein deaminates the target nucleobase. The insertion location of different deaminases can be different in order to have proximity between the target nucleobase and an amino acid in the C-terminus of the N terminal Cas9 fragment or the N-terminus of the C terminal Cas9 fragment. For example, the insertion position of an ABE can be at an amino acid residue selected from the group consisting of: 1015, 1022, 1029, 1040, 1068, 1247, 1054, 1026, 768, 1067, 1248, 1052, and 1246 as numbered in the above Cas9 reference sequence, or a corresponding amino acid residue in another Cas9 polypeptide.

[0429] The N-terminal Cas9 fragment of a fusion protein (i.e. the N-terminal Cas9 fragment flanking the deaminase in a fusion protein) can comprise the N-terminus of a Cas9 polypeptide. The N-terminal Cas9 fragment of a fusion protein can comprise a length of at least about: 100, 200, 300, 400, 500, 600, 700, 800, 900, 1000, 1100, 1200, or 1300 amino acids. The N-terminal Cas9 fragment of a fusion protein can comprise a sequence corresponding to amino acid residues: 1-56, 1-95, 1-200, 1-300, 1-400, 1-500, 1-600, 1-700, 1-718, 1-765, 1-780, 1-906, 1-918, or 1-1100 as numbered in the above Cas9 reference sequence, or a corresponding amino acid residue in another Cas9 polypeptide. The N-terminal Cas9 fragment can comprise a sequence comprising at least: 85%, at least 90%, at least 91%, at least 92%, at least 93%, at least 94%, at least 95%, at least 96%, at least 97%, at least 98%, at least 99%, or at least 99.5% sequence identity to amino acid residues: 1-56, 1-95, 1-200, 1-300, 1-400, 1-500, 1-600, 1-700, 1-718, 1-765, 1-780, 1-906, 1-918, or 1-1100 as numbered in the above Cas9 reference sequence, or a corresponding amino acid residue in another Cas9 polypeptide.

[0430] The C-terminal Cas9 fragment of a fusion protein (i.e. the C-terminal Cas9 fragment flanking the deaminase in a fusion protein) can comprise the C-terminus of a Cas9 polypeptide. The C-terminal Cas9 fragment of a fusion protein can comprise a length of at least about: 100, 200, 300, 400, 500, 600, 700, 800, 900, 1000, 1100, 1200, or 1300 amino acids. The C-terminal Cas9 fragment of a fusion protein can comprise a sequence corresponding to amino acid residues: 1099-1368, 918-1368, 906-1368, 780-1368, 765-1368, 718-1368, 94-1368, or 56-1368 as numbered in the above Cas9 reference sequence, or a corresponding amino acid residue in another Cas9 polypeptide. The N-terminal Cas9 fragment can comprise a sequence comprising at least: 85%, at least 90%, at least 91%, at least 92%, at least 93%, at least 94%, at least 95%, at least 96%, at least 97%, at least 98%, at least 99%, or at least 99.5% sequence identity to amino acid residues: 1099-1368, 918-1368, 906-1368, 780-1368, 765-1368, 718-1368, 94-1368, or 56-1368 as numbered in the above Cas9 reference sequence, or a corresponding amino acid residue in another Cas9 polypeptide.

[0431] The N-terminal Cas9 fragment and C-terminal Cas9 fragment of a fusion protein taken together may not correspond to a full-length naturally occurring Cas9 polypeptide sequence, for example, as set forth in the above Cas9 reference sequence.

[0432] The fusion protein described herein can effect targeted deamination with reduced deamination at non-target sites (e.g., off-target sites), such as reduced genome wide spurious deamination. The fusion protein described herein can effect targeted deamination with reduced bystander deamination at non-target sites. The undesired deamination or off-target deamination can be reduced by at least 30%, at least 40%, at least 50%, at least 60%, at least 70%, at least 80%, at least 90%, at least 95%, or at least 99% compared with, for example, an end terminus fusion protein comprising the deaminase fused to a N terminus or a C terminus of a Cas9 polypeptide. The undesired deamination or off-target deamination can be reduced by at least one-fold, at least two-fold, at least three-fold, at least four-fold, at least five-fold, at least tenfold, at least fifteen fold, at least twenty fold, at least thirty fold, at least forty fold, at least fifty fold, at least 60 fold, at least 70 fold, at least 80 fold, at least 90 fold, or at least hundred fold, compared with, for example, an end terminus fusion protein comprising the deaminase fused to a N terminus or a C terminus of a Cas9 polypeptide.

[0433] In some embodiments, the deaminase (e.g., adenosine deaminase, cytidine deaminase, or adenosine deaminase and cytidine deaminase) of the fusion protein deaminates no more than two nucleobases within the range of an R-loop. In some embodiments, the deaminase of the fusion protein deaminates no more than three nucleobases within the range of the R-loop. In some embodiments, the deaminase of the fusion protein deaminates no more than 2, 3, 4, 5, 6, 7, 8, 9, or 10 nucleobases within the range of the R-loop. An R-loop is a three-stranded nucleic acid structure including a DNA:RNA hybrid, a DNA:DNA or an RNA: RNA complementary structure and the associated with single-stranded DNA. As used herein, an R-loop may be formed when a target polynucleotide is contacted with a CRISPR complex or a base editing complex, wherein a portion of a guide polynucleotide, e.g. a guide RNA, hybridizes with and displaces with a portion of a target polynucleotide, e.g. a target DNA. In some embodiments, an R-loop comprises a hybridized region of a spacer sequence and a target DNA complementary sequence. An R-loop region may be of about 5, 6, 7, 8, 9, 10, 11, 12, 13, 14, 15, 16, 17, 18, 19, 20, 21, 22, 23, 24, 25, 26, 27, 28, 29, 30, 31, 32, 33, 34, 35, 36, 37, 38, 39, 40, 41, 42, 43, 44, 45, 46, 47, 48, 49, or 50 nucleobase pairs in length. In some embodiments, the R-loop region is about 20 nucleobase pairs in length. It should be understood that, as used herein, an R-loop region is not limited to the target DNA strand that hybridizes with the guide polynucleotide. For example, editing of a target nucleobase within an R-loop region may be to a DNA strand that comprises the complementary strand to a guide RNA, or may be to a DNA strand that is the opposing strand of the strand complementary to the guide RNA. In some embodiments, editing in the region of the R-loop comprises editing a nucleobase on non-complementary strand (protospacer strand) to a guide RNA in a target DNA sequence.

[0434] The fusion protein described herein can effect target deamination in an editing window different from canonical base editing. In some embodiments, a target nucleobase is from about 1 to about 20 bases upstream of a PAM sequence in the target polynucleotide sequence. In some embodiments, a target nucleobase is from about 2 to about 12 bases upstream of a PAM sequence in the target polynucleotide sequence. In some embodiments, a target nucleobase is from about 1 to 9 base pairs, about 2 to 10 base pairs, about 3 to 11 base pairs, about 4 to 12 base pairs, about 5 to 13 base pairs, about 6 to 14 base pairs, about 7 to 15 base pairs, about 8 to 16 base pairs, about 9 to 17 base pairs, about 10 to 18 base pairs, about 11 to 19 base pairs, about 12 to 20 base pairs, about 1 to 7 base pairs, about 2 to 8 base pairs, about 3 to 9 base pairs, about 4 to 10 base pairs, about 5 to 11 base pairs, about 6 to 12 base pairs, about 7 to 13 base pairs, about 8 to 14 base pairs, about 9 to 15 base pairs, about 10 to 16 base pairs, about 11 to 17 base pairs, about 12 to 18 base pairs, about 13 to 19 base pairs, about 14 to 20 base pairs, about 1 to 5 base pairs, about 2 to 6 base pairs, about 3 to 7 base pairs, about 4 to 8 base pairs, about 5 to 9 base pairs, about 6 to 10 base pairs, about 7 to 11 base pairs, about 8 to 12 base pairs, about 9 to 13 base pairs, about 10 to 14 base pairs, about 11 to 15 base pairs, about 12 to 16 base pairs, about 13 to 17 base pairs, about 14 to 18 base pairs, about 15 to 19 base pairs, about 16 to 20 base pairs, about 1 to 3 base pairs, about 2 to 4 base pairs, about 3 to 5 base pairs, about 4 to 6 base pairs, about 5 to 7 base pairs, about 6 to 8 base pairs, about 7 to 9 base pairs, about 8 to 10 base pairs, about 9 to 11 base pairs, about 10 to 12 base pairs, about 11 to 13 base pairs, about 12 to 14 base pairs, about 13 to 15 base pairs, about 14 to 16 base pairs, about 15 to 17 base pairs, about 16 to 18 base pairs, about 17 to 19 base pairs, about 18 to 20 base pairs away or upstream of the PAM sequence. In some embodiments, a target nucleobase is about 1, 2, 3, 4, 5, 6, 7, 8, 9, 10, 11, 12, 13, 14, 15, 16, 17, 18, 19, 20, or more base pairs away from or upstream of the PAM sequence. In some embodiments, a target nucleobase is about 1, 2, 3, 4, 5, 6, 7, 8, or 9 base pairs upstream of the PAM sequence. In some embodiments, a target nucleobase is about 2, 3, 4, or 6 base pairs upstream of the PAM sequence.

[0435] The fusion protein can comprise more than one heterologous polypeptide. For example, the fusion protein can additionally comprise one or more UGI domains and/or one or more nuclear localization signals. The two or more heterologous domains can be inserted in tandem. The two or more heterologous domains can be inserted at locations such that they are not in tandem in the NapDNAbp.

[0436] A fusion protein can comprise a linker between the deaminase and the napDNAbp polypeptide. The linker can be a peptide or a non-peptide linker. For example, the linker can be an XTEN, (GGGS)n, (GGGGS)n, (G)n, (EAAAK)n, (GGS)n, SGSETPGTSESATPES. In some embodiments, the fusion protein comprises a linker between the N-terminal Cas9 fragment and the deaminase. In some embodiments, the fusion protein comprises a linker between the C-terminal Cas9 fragment and the deaminase. In some embodiments, the N-terminal and C-terminal fragments of napDNAbp are connected to the deaminase with a linker. In some embodiments, the N-terminal and C-terminal fragments are joined to the deaminase domain without a linker. In some embodiments, the fusion protein comprises a linker between the N-terminal Cas9 fragment and the deaminase, but does not comprise a linker between the C-terminal Cas9 fragment and the deaminase. In some embodiments, the fusion protein comprises a linker between the C-terminal Cas9 fragment and the deaminase, but does not comprise a linker between the N-terminal Cas9 fragment and the deaminase.

[0437] In some embodiments, the napDNAbp in the fusion protein is a Cas12 polypeptide, e.g., Cas12b/C2c1, or a fragment thereof. The Cas12 polypeptide can be a variant Cas12 polypeptide. In other embodiments, the N- or C-terminal fragments of the Cas12 polypeptide comprise a nucleic acid programmable DNA binding domain or a RuvC domain. In other embodiments, the fusion protein contains a linker between the Cas12 polypeptide and the catalytic domain. In other embodiments, the amino acid sequence of the linker is GGSGGS or GSSGSETPGTSESATPESSG. In other embodiments, the linker is a rigid linker. In other embodiments of the above aspects, the linker is encoded by GGAGGCTCTGGAGGAAGC or GGCTCTTCTGGATCTGAAACACCTGGCACAAGCGAGAGCGCCACCCCTGAGAGCTCTGGC.

[0438] Fusion proteins comprising a heterologous catalytic domain flanked by N- and C-terminal fragments of a Cas12 polypeptide are also useful for base editing in the methods as described herein. Fusion proteins comprising Cas12 and one or more deaminase domains, e.g., adenosine deaminase, or comprising an adenosine deaminase domain flanked by Cas12 sequences are also useful for highly specific and efficient base editing of target sequences. In an embodiment, a chimeric Cas12 fusion protein contains a heterologous catalytic domain (e.g., adenosine deaminase, cytidine deaminase, or adenosine deaminase and cytidine deaminase) inserted within a Cas12 polypeptide. In some embodiments, the fusion protein comprises an adenosine deaminase domain and a cytidine deaminase domain inserted within a Cas12. In some embodiments, an adenosine deaminase is fused within Cas12 and a cytidine deaminase is fused to the C-terminus. In some embodiments, an adenosine deaminase is fused within Cas12 and a cytidine deaminase fused to the N-terminus. In some embodiments, a cytidine deaminase is fused within Cas12 and an adenosine deaminase is fused to the C-terminus. In some embodiments, a cytidine deaminase is fused within Cas12 and an adenosine deaminase fused to the N-terminus. Exemplary structures of a fusion protein with an adenosine deaminase and a cytidine deaminase and a Cas12 are provided as follows:

[0439] NH₂-[Cas12(adenosine deaminase)]-[cytidine deaminase]-COOH;

[0440] NH₂-[cytidine deaminase]-[Cas12(adenosine deaminase)]-COOH;

[0441] NH₂-[Cas12(cytidine deaminase)]-[adenosine deaminase]-COOH; or

[0442] NH₂-[adenosine deaminase]-[Cas12(cytidine deaminase)]-COOH;

In some embodiments, the “-” used in the general architecture above indicates the presence of an optional linker.

[0443] In various embodiments, the catalytic domain has DNA modifying activity (e.g., deaminase activity), such as adenosine deaminase activity. In some embodiments, the adenosine deaminase is a TadA (e.g., TadA7.10). In some embodiments, the TadA is a TadA*8. In some embodiments, a TadA*8 is fused within Cas12 and a cytidine deaminase is fused to the C-terminus. In some embodiments, a TadA*8 is fused within Cas12 and a cytidine deaminase fused to the N-terminus. In some embodiments, a cytidine deaminase is fused within Cas12 and a TadA*8 is fused to the C-terminus. In some embodiments, a cytidine deaminase is fused within Cas12 and a TadA*8 fused to the N-terminus. Exemplary structures of a fusion protein with a TadA*8 and a cytidine deaminase and a Cas12 are provided as follows:

[0444] N-[Cas12(TadA*8)]-[cytidine deaminase]-C;

[0445] N-[cytidine deaminase]-[Cas12(TadA*8)]-C;

[0446] N-[Cas12(cytidine deaminase)]-[TadA*8]-C; or

[0447] N-[TadA*8]-[Cas12(cytidine deaminase)]-C.

In some embodiments, the “-” used in the general architecture above indicates the presence of an optional linker.

[0448] In other embodiments, the fusion protein contains one or more catalytic domains. In other embodiments, at least one of the one or more catalytic domains is inserted within the Cas12 polypeptide or is fused at the Cas12 N-terminus or C-terminus. In other embodiments, at least one of the one or more catalytic domains is inserted within a loop, an alpha helix region, an unstructured portion, or a solvent accessible portion of the Cas12 polypeptide. In other embodiments, the Cas12 polypeptide is Cas12a, Cas12b, Cas12c, Cas12d, Cas12e, Cas12g, Cas12h, Cas12i, or Cas12j/CasΦ. In other embodiments, the Cas12 polypeptide has at least about 85% amino acid sequence identity to Bacillus hisashii Cas12b, Bacillus thermoamylovorans Cas12b, Bacillus sp. V3-13 Cas12b, or Alicyclobacillus acidiphilus Cas12b. In other embodiments, the Cas12 polypeptide has at least about 90% amino acid sequence identity to Bacillus hisashii Cas12b, Bacillus thermoamylovorans Cas12b, Bacillus sp. V3-13 Cas12b, or Alicyclobacillus acidiphilus Cas12b. In other embodiments, the Cas12 polypeptide has at least about 95% amino acid sequence identity to Bacillus hisashii Cas12b, Bacillus thermoamylovorans Cas12b, Bacillus sp. V3-13 Cas12b, or Alicyclobacillus acidiphilus Cas12b. In other embodiments, the Cas12 polypeptide contains or consists essentially of a fragment of Bacillus hisashii Cas12b, Bacillus thermoamylovorans Cas12b, Bacillus sp. V3-13 Cas12b, or Alicyclobacillus acidiphilus Cas12b.

[0449] In other embodiments, the catalytic domain is inserted between amino acid positions 153-154, 255-256, 306-307, 980-981, 1019-1020, 534-535, 604-605, or 344-345 of BhCas12b or a corresponding amino acid residue of Cas12a, Cas12c, Cas12d, Cas12e, Cas12g, Cas12h, Cas12i, or Cas12j/CasΦ. In other embodiments, the catalytic domain is inserted between amino acids P153 and 5154 of BhCas12b. In other embodiments, the catalytic domain is inserted between amino acids K255 and E256 of BhCas12b. In other embodiments, the catalytic domain is inserted between amino acids D980 and G981 of BhCas12b. In other embodiments, the catalytic domain is inserted between amino acids K1019 and L1020 of BhCas12b. In other embodiments, the catalytic domain is inserted between amino acids F534 and P535 of BhCas12b. In other embodiments, the catalytic domain is inserted between amino acids K604 and G605 of BhCas12b. In other embodiments, the catalytic domain is inserted between amino acids H344 and F345 of BhCas12b. In other embodiments, catalytic domain is inserted between amino acid positions 147 and 148, 248 and 249, 299 and 300, 991 and 992, or 1031 and 1032 of BvCas12b or a corresponding amino acid residue of Cas12a, Cas12c, Cas12d, Cas12e, Cas12g, Cas12h, Cas12i, or Cas12j/CasΦ. In other embodiments, the catalytic domain is inserted between amino acids P147 and D148 of BvCas12b. In other embodiments, the catalytic domain is inserted between amino acids G248 and G249 of BvCas12b. In other embodiments, the catalytic domain is inserted between amino acids P299 and E300 of BvCas12b. In other embodiments, the catalytic domain is inserted between amino acids G991 and E992 of BvCas12b. In other embodiments, the catalytic domain is inserted between amino acids K1031 and M1032 of BvCas12b. In other embodiments, the catalytic domain is inserted between amino acid positions 157 and 158, 258 and 259, 310 and 311, 1008 and 1009, or 1044 and 1045 of AaCas12b or a corresponding amino acid residue of Cas12a, Cas12c, Cas12d, Cas12e, Cas12g, Cas12h, Cas12i, or Cas12j/CasΦ. In other embodiments, the catalytic domain is inserted between amino acids P157 and G158 of AaCas12b. In other embodiments, the catalytic domain is inserted between amino acids V258 and G259 of AaCas12b. In other embodiments, the catalytic domain is inserted between amino acids D310 and P311 of AaCas12b. In other embodiments, the catalytic domain is inserted between amino acids G1008 and E1009 of AaCas12b. In other embodiments, the catalytic domain is inserted between amino acids G1044 and K1045 at of AaCas12b.

[0450] In other embodiments, the fusion protein contains a nuclear localization signal (e.g., a bipartite nuclear localization signal). In other embodiments, the amino acid sequence of the nuclear localization signal is MAPKKKRKVGIHGVPAA. In other embodiments of the above aspects, the nuclear localization signal is encoded by the following sequence: ATGGCCCCAAAGAAGAAGCGGAAGGTCGGTATCCACGGAGTCCCAGCAGCC. In other embodiments, the Cas12b polypeptide contains a mutation that silences the catalytic activity of a RuvC domain. In other embodiments, the Cas12b polypeptide contains D574A, D829A and/or D952A mutations. In other embodiments, the fusion protein further contains a tag (e.g., an influenza hemagglutinin tag).

[0451] In some embodiments, the fusion protein comprises a napDNAbp domain (e.g., Cas12-derived domain) with an internally fused nucleobase editing domain (e.g., all or a portion of a deaminase domain, e.g., an adenosine deaminase domain). In some embodiments, the napDNAbp is a Cas12b. In some embodiments, the base editor comprises a BhCas12b domain with an internally fused TadA*8 domain inserted at the loci provided in Table 7 below.

TABLE 7
Insertion loci in Cast12b proteins

| BhCas12b | Insertion site | Inserted between aa |
|---|---|---|
| position 1 | 153 | PS |
| position 2 | 255 | KE |
| position 3 | 306 | DE |
| position 4 | 980 | DG |
| position 5 | 1019 | KL |
| position 6 | 534 | FP |
| position 7 | 604 | KG |
| position 8 | 344 | HF |
| BvCas12b | Insertion site | Inserted between aa |
| position 1 | 147 | PD |
| position 2 | 248 | GG |
| position 3 | 299 | PE |
| position 4 | 991 | GE |
| position 5 | 1031 | KM |
| AaCas12b | Insertion site | Inserted between aa |
| position 1 | 157 | PG |
| position 2 | 258 | VG |
| position 3 | 310 | DP |
| position 4 | 1008 | GE |
| position 5 | 1044 | GK |

[0452] By way of nonlimiting example, an adenosine deaminase (e.g., ABE8.13) may be inserted into a BhCas12b to produce a fusion protein (e.g., ABE8.13-BhCas12b) that effectively edits a nucleic acid sequence.

[0453] In some embodiments, the base editing system described herein comprises an ABE with TadA inserted into a Cas9. Sequences of relevant ABEs with TadA inserted into a Cas9 are provided.

101 Cas9 TadAins 1015
MDKKYSIGLAIGTNSVGWAVITDEYKVPSKKFKVLGNTDRHSIKKNLIGA
LLFDSGETAEATRLKRTARRRYTRRKNRICYLQEIFSNEMAKVDDSFFHR
LEESFLVEEDKKHERHPIFGNIVDEVAYHEKYPTIYHLRKKLVDSTDKAD
LRLIYLALAHMIKFRGHFLIEGDLNPDNSDVDKLEIQLVQTYNQLFEENP
INASGVDAKAILSARLSKSRRLENLIAQLPGEKKNGLFGNLIALSLGLTP
NFKSNFDLAEDAKLQLSKDTYDDDLDNLLAQIGDQYADLFLAAKNLSDAI
LLSDILRVNTEITKAPLSASMIKRYDEHHQDLTLLKALVRQQLPEKYKEI
FFDQSKNGYAGYIDGGASQEEFYKFIKPILEKMDGTEELLVKLNREDLLR
KQRTFDNGSIPHQIHLGELHAILRRQEDFYPFLKDNREKIEKILTFRIPY
YVGPLARGNSRFAWMTRKSEETITPWNFEEVVDKGASAQSFIERMTNFDK
NLPNEKVLPKHSLLYEYFTVYNELTKVKYVTEGMRKPAFLSGEQKKAIVD
LLFKTNRKVTVKQLKEDYFKKIECFDSVEISGVEDRFNASLGTYHDLLKI
IKDKDFLDNEENEDILEDIVLTLTLFEDREMIEERLKTYAHLFDDKVMKQ
LKRRRYTGWGRLSRKLINGIRDKQSGKTILDFLKSDGFANRNFMQLIHDD
SLTFKEDIQKAQVSGQGDSLHEHIANLAGSPAIKKGILQTVKVVDELVKV
MGRHKPENIVIEMARENQTTQKGQKNSRERMKRIEEGIKELGSQILKEHP
VENTQLQNEKLYLYYLQNGRDMYVDQELDINRLSDYDVDHIVPQSFLKDD
SIDNKVLTRSDKNRGKSDNVPSEEVVKKMKNYWRQLLNAKLITQRKFDNL
TKAERGGLSELDKAGFIKRQLVETRQITKHVAQILDSRMNTKYDENDKLI
REVKVITLKSKLVSDFRKDFQFYKVREINNYHHAHDAYLNAVVGTALIKK
YPKLESEFVYGDYKVGSSGSETPGTSESATPESSGSEVEFSHEYWMRHAL
TLAKRARDEREVPVGAVLVLNNRVIGEGWNRAIGLHDPTAHAEIMALRQG
GLVMQNYRLIDATLYVTFEPCVMCAGAMIHSRIGRVVFGVRNAKTGAAGS
LMDVLHYPGMNHRVEITEGILADECAALLCYFFRMPRQVFNAQKKAQSST
DYDVRKMIAKSEQEIGKATAKYFFYSNIMNFFKTEITLANGEIRKRPLIE
TNGETGEIVWDKGRDFATVRKVLSMPQVNIVKKTEVQTGGFSKESILPKR
NSDKLIARKKDWDPKKYGGFDSPTVAYSVLVVAKVEKGKSKKLKSVKELL
GITIMERSSFEKNPIDFLEAKGYKEVKKDLIIKLPKYSLFELENGRKRML
ASAGELQKGNELALPSKYVNFLYLASHYEKLKGSPEDNEQKQLFVEQHKH
YLDEIIEQISEFSKRVILADANLDKVLSAYNKHRDKPIREQAENIIHLFT
LTNLGAPAAFKYFDTTIDRKRYTSTKEVLDATLIHQSITGLYETRIDLSQ
LGGD
102 Cas9 TadAins 1022
MDKKYSIGLAIGTNSVGWAVITDEYKVPSKKFKVLGNTDRHSIKKNLIGA
LLFDSGETAEATRLKRTARRRYTRRKNRICYLQEIFSNEMAKVDDSFFHR
LEESFLVEEDKKHERHPIFGNIVDEVAYHEKYPTIYHLRKKLVDSTDKAD
LRLIYLALAHMIKFRGHFLIEGDLNPDNSDVDKLEIQLVQTYNQLFEENP
INASGVDAKAILSARLSKSRRLENLIAQLPGEKKNGLFGNLIALSLGLTP
NFKSNFDLAEDAKLQLSKDTYDDDLDNLLAQIGDQYADLFLAAKNLSDAI
LLSDILRVNTEITKAPLSASMIKRYDEHHQDLTLLKALVRQQLPEKYKEI
FFDQSKNGYAGYIDGGASQEEFYKFIKPILEKMDGTEELLVKLNREDLLR
KQRTFDNGSIPHQIHLGELHAILRRQEDFYPFLKDNREKIEKILTFRIPY
YVGPLARGNSRFAWMTRKSEETITPWNFEEVVDKGASAQSFIERMTNFDK
NLPNEKVLPKHSLLYEYFTVYNELTKVKYVTEGMRKPAFLSGEQKKAIVD
LLFKTNRKVTVKQLKEDYFKKIECFDSVEISGVEDRFNASLGTYHDLLKI
IKDKDFLDNEENEDILEDIVLTLTLFEDREMIEERLKTYAHLFDDKVMKQ
LKRRRYTGWGRLSRKLINGIRDKQSGKTILDFLKSDGFANRNFMQLIHDD
SLTFKEDIQKAQVSGQGDSLHEHIANLAGSPAIKKGILQTVKVVDELVKV
MGRHKPENIVIEMARENQTTQKGQKNSRERMKRIEEGIKELGSQILKEHP
VENTQLQNEKLYLYYLQNGRDMYVDQELDINRLSDYDVDHIVPQSFLKDD
SIDNKVLTRSDKNRGKSDNVPSEEVVKKMKNYWRQLLNAKLITQRKFDNL
TKAERGGLSELDKAGFIKRQLVETRQITKHVAQILDSRMNTKYDENDKLI
REVKVITLKSKLVSDFRKDFQFYKVREINNYHHAHDAYLNAVVGTALIKK
YPKLESEFVYGDYKVYDVRKMIGSSGSETPGTSESATPESSGSEVEFSHE
YWMRHALTLAKRARDEREVPVGAVLVLNNRVIGEGWNRAIGLHDPTAHAE
IMALRQGGLVMQNYRLIDATLYVTFEPCVMCAGAMIHSRIGRVVFGVRNA
KTGAAGSLMDVLHYPGMNHRVEITEGILADECAALLCYFFRMPRQVFNAQ
KKAQSSTDAKSEQEIGKATAKYFFYSNIMNFFKTEITLANGEIRKRPLIE
TNGETGEIVWDKGRDFATVRKVLSMPQVNIVKKTEVQTGGFSKESILPKR
NSDKLIARKKDWDPKKYGGFDSPTVAYSVLVVAKVEKGKSKKLKSVKELL
GITIMERSSFEKNPIDFLEAKGYKEVKKDLIIKLPKYSLFELENGRKRML
ASAGELQKGNELALPSKYVNFLYLASHYEKLKGSPEDNEQKQLFVEQHKH
YLDEIIEQISEFSKRVILADANLDKVLSAYNKHRDKPIREQAENIIHLFT
LTNLGAPAAFKYFDTTIDRKRYTSTKEVLDATLIHQSITGLYETRIDLSQ
LGGD
103 Cas9 TadAins 1029
MDKKYSIGLAIGTNSVGWAVITDEYKVPSKKFKVLGNTDRHSIKKNLIGA
LLFDSGETAEATRLKRTARRRYTRRKNRICYLQEIFSNEMAKVDDSFFHR
LEESFLVEEDKKHERHPIFGNIVDEVAYHEKYPTIYHLRKKLVDSTDKAD
LRLIYLALAHMIKFRGHFLIEGDLNPDNSDVDKLEIQLVQTYNQLFEENP
INASGVDAKAILSARLSKSRRLENLIAQLPGEKKNGLFGNLIALSLGLTP
NFKSNFDLAEDAKLQLSKDTYDDDLDNLLAQIGDQYADLFLAAKNLSDAI
LLSDILRVNTEITKAPLSASMIKRYDEHHQDLTLLKALVRQQLPEKYKEI
FFDQSKNGYAGYIDGGASQEEFYKFIKPILEKMDGTEELLVKLNREDLLR
KQRTFDNGSIPHQIHLGELHAILRRQEDFYPFLKDNREKIEKILTFRIPY
YVGPLARGNSRFAWMTRKSEETITPWNFEEVVDKGASAQSFIERMTNFDK
NLPNEKVLPKHSLLYEYFTVYNELTKVKYVTEGMRKPAFLSGEQKKAIVD
LLFKTNRKVTVKQLKEDYFKKIECFDSVEISGVEDRFNASLGTYHDLLKI
IKDKDFLDNEENEDILEDIVLTLTLFEDREMIEERLKTYAHLFDDKVMKQ
LKRRRYTGWGRLSRKLINGIRDKQSGKTILDFLKSDGFANRNFMQLIHDD
SLTFKEDIQKAQVSGQGDSLHEHIANLAGSPAIKKGILQTVKVVDELVKV
MGRHKPENIVIEMARENQTTQKGQKNSRERMKRIEEGIKELGSQILKEHP
VENTQLQNEKLYLYYLQNGRDMYVDQELDINRLSDYDVDHIVPQSFLKDD
SIDNKVLTRSDKNRGKSDNVPSEEVVKKMKNYWRQLLNAKLITQRKFDNL
TKAERGGLSELDKAGFIKRQLVETRQITKHVAQILDSRMNTKYDENDKLI
REVKVITLKSKLVSDFRKDFQFYKVREINNYHHAHDAYLNAVVGTALIKK
YPKLESEFVYGDYKVYDVRKMIAKSEQEIGSSGSETPGTSESATPESSGS
EVEFSHEYWMRHALTLAKRARDEREVPVGAVLVLNNRVIGEGWNRAIGLH
DPTAHAEIMALRQGGLVMQNYRLIDATLYVTFEPCVMCAGAMIHSRIGRV
VFGVRNAKTGAAGSLMDVLHYPGMNHRVEITEGILADECAALLCYFFRMP
RQVFNAQKKAQSSTDGKATAKYFFYSNIMNFFKTEITLANGEIRKRPLIE
TNGETGEIVWDKGRDFATVRKVLSMPQVNIVKKTEVQTGGFSKESILPKR
NSDKLIARKKDWDPKKYGGFDSPTVAYSVLVVAKVEKGKSKKLKSVKELL
GITIMERSSFEKNPIDFLEAKGYKEVKKDLIIKLPKYSLFELENGRKRML
ASAGELQKGNELALPSKYVNFLYLASHYEKLKGSPEDNEQKQLFVEQHKH
YLDEIIEQISEFSKRVILADANLDKVLSAYNKHRDKPIREQAENIIHLFT
LTNLGAPAAFKYFDTTIDRKRYTSTKEVLDATLIHQSITGLYETRIDLSQ
LGGD
103 Cas9 TadAins 1040
MDKKYSIGLAIGTNSVGWAVITDEYKVPSKKFKVLGNTDRHSIKKNLIGA
LLFDSGETAEATRLKRTARRRYTRRKNRICYLQEIFSNEMAKVDDSFFHR
LEESFLVEEDKKHERHPIFGNIVDEVAYHEKYPTIYHLRKKLVDSTDKAD
LRLIYLALAHMIKFRGHFLIEGDLNPDNSDVDKLEIQLVQTYNQLFEENP
INASGVDAKAILSARLSKSRRLENLIAQLPGEKKNGLFGNLIALSLGLTP
NFKSNFDLAEDAKLQLSKDTYDDDLDNLLAQIGDQYADLFLAAKNLSDAI
LLSDILRVNTEITKAPLSASMIKRYDEHHQDLTLLKALVRQQLPEKYKEI
FFDQSKNGYAGYIDGGASQEEFYKFIKPILEKMDGTEELLVKLNREDLLR
KQRTFDNGSIPHQIHLGELHAILRRQEDFYPFLKDNREKIEKILTFRIPY
YVGPLARGNSRFAWMTRKSEETITPWNFEEVVDKGASAQSFIERMTNFDK
NLPNEKVLPKHSLLYEYFTVYNELTKVKYVTEGMRKPAFLSGEQKKAIVD
LLFKTNRKVTVKQLKEDYFKKIECFDSVEISGVEDRFNASLGTYHDLLKI
IKDKDFLDNEENEDILEDIVLTLTLFEDREMIEERLKTYAHLFDDKVMKQ
LKRRRYTGWGRLSRKLINGIRDKQSGKTILDFLKSDGFANRNFMQLIHDD
SLTFKEDIQKAQVSGQGDSLHEHIANLAGSPAIKKGILQTVKVVDELVKV
MGRHKPENIVIEMARENQTTQKGQKNSRERMKRIEEGIKELGSQILKEHP
VENTQLQNEKLYLYYLQNGRDMYVDQELDINRLSDYDVDHIVPQSFLKDD
SIDNKVLTRSDKNRGKSDNVPSEEVVKKMKNYWRQLLNAKLITQRKFDNL
TKAERGGLSELDKAGFIKRQLVETRQITKHVAQILDSRMNTKYDENDKLI
REVKVITLKSKLVSDFRKDFQFYKVREINNYHHAHDAYLNAVVGTALIKK
YPKLESEFVYGDYKVYDVRKMIAKSEQEIGKATAKYFFYSGSSGSETPGT
SESATPESSGSEVEFSHEYWMRHALTLAKRARDEREVPVGAVLVLNNRVI
GEGWNRAIGLHDPTAHAEIMALRQGGLVMQNYRLIDATLYVTFEPCVMCA
GAMIHSRIGRVVFGVRNAKTGAAGSLMDVLHYPGMNHRVEITEGILADEC
AALLCYFFRMPRQVFNAQKKAQSSTDNIMNFFKTEITLANGEIRKRPLIE
TNGETGEIVWDKGRDFATVRKVLSMPQVNIVKKTEVQTGGFSKESILPKR
NSDKLIARKKDWDPKKYGGFDSPTVAYSVLVVAKVEKGKSKKLKSVKELL
GITIMERSSFEKNPIDFLEAKGYKEVKKDLIIKLPKYSLFELENGRKRML
ASAGELQKGNELALPSKYVNFLYLASHYEKLKGSPEDNEQKQLFVEQHKH
YLDEIIEQISEFSKRVILADANLDKVLSAYNKHRDKPIREQAENIIHLFT
LTNLGAPAAFKYFDTTIDRKRYTSTKEVLDATLIHQSITGLYETRIDLSQ
LGGD
105 Cas9 TadAins 1068
MDKKYSIGLAIGTNSVGWAVITDEYKVPSKKFKVLGNTDRHSIKKNLIGA
LLFDSGETAEATRLKRTARRRYTRRKNRICYLQEIFSNEMAKVDDSFFHR
LEESFLVEEDKKHERHPIFGNIVDEVAYHEKYPTIYHLRKKLVDSTDKAD
LRLIYLALAHMIKFRGHFLIEGDLNPDNSDVDKLEIQLVQTYNQLFEENP
INASGVDAKAILSARLSKSRRLENLIAQLPGEKKNGLFGNLIALSLGLTP
NFKSNFDLAEDAKLQLSKDTYDDDLDNLLAQIGDQYADLFLAAKNLSDAI
LLSDILRVNTEITKAPLSASMIKRYDEHHQDLTLLKALVRQQLPEKYKEI
FFDQSKNGYAGYIDGGASQEEFYKFIKPILEKMDGTEELLVKLNREDLLR
KQRTFDNGSIPHQIHLGELHAILRRQEDFYPFLKDNREKIEKILTFRIPY
YVGPLARGNSRFAWMTRKSEETITPWNFEEVVDKGASAQSFIERMTNFDK
NLPNEKVLPKHSLLYEYFTVYNELTKVKYVTEGMRKPAFLSGEQKKAIVD
LLFKTNRKVTVKQLKEDYFKKIECFDSVEISGVEDRFNASLGTYHDLLKI
IKDKDFLDNEENEDILEDIVLTLTLFEDREMIEERLKTYAHLFDDKVMKQ
LKRRRYTGWGRLSRKLINGIRDKQSGKTILDFLKSDGFANRNFMQLIHDD
SLTFKEDIQKAQVSGQGDSLHEHIANLAGSPAIKKGILQTVKVVDELVKV
MGRHKPENIVIEMARENQTTQKGQKNSRERMKRIEEGIKELGSQILKEHP
VENTQLQNEKLYLYYLQNGRDMYVDQELDINRLSDYDVDHIVPQSFLKDD
SIDNKVLTRSDKNRGKSDNVPSEEVVKKMKNYWRQLLNAKLITQRKFDNL
TKAERGGLSELDKAGFIKRQLVETRQITKHVAQILDSRMNTKYDENDKLI
REVKVITLKSKLVSDFRKDFQFYKVREINNYHHAHDAYLNAVVGTALIKK
YPKLESEFVYGDYKVYDVRKMIAKSEQEIGKATAKYFFYSNIMNFFKTEI
TLANGEIRKRPLIETNGEGSSGSETPGTSESATPESSGSEVEFSHEYWMR
HALTLAKRARDEREVPVGAVLVLNNRVIGEGWNRAIGLHDPTAHAEIMAL
RQGGLVMQNYRLIDATLYVTFEPCVMCAGAMIHSRIGRVVFGVRNAKTGA
AGSLMDVLHYPGMNHRVEITEGILADECAALLCYFFRMPRQVFNAQKKAQ
SSTDTGEIVWDKGRDFATVRKVLSMPQVNIVKKTEVQTGGFSKESILPKR
NSDKLIARKKDWDPKKYGGFDSPTVAYSVLVVAKVEKGKSKKLKSVKELL
GITIMERSSFEKNPIDFLEAKGYKEVKKDLIIKLPKYSLFELENGRKRML
ASAGELQKGNELALPSKYVNFLYLASHYEKLKGSPEDNEQKQLFVEQHKH
YLDEIIEQISEFSKRVILADANLDKVLSAYNKHRDKPIREQAENIIHLFT
LTNLGAPAAFKYFDTTIDRKRYTSTKEVLDATLIHQSITGLYETRIDLSQ
LGGD
106 Cas9 TadAins 1247
MDKKYSIGLAIGTNSVGWAVITDEYKVPSKKFKVLGNTDRHSIKKNLIGA
LLFDSGETAEATRLKRTARRRYTRRKNRICYLQEIFSNEMAKVDDSFFHR
LEESFLVEEDKKHERHPIFGNIVDEVAYHEKYPTIYHLRKKLVDSTDKAD
LRLIYLALAHMIKFRGHFLIEGDLNPDNSDVDKLEIQLVQTYNQLFEENP
INASGVDAKAILSARLSKSRRLENLIAQLPGEKKNGLFGNLIALSLGLTP
NFKSNFDLAEDAKLQLSKDTYDDDLDNLLAQIGDQYADLFLAAKNLSDAI
LLSDILRVNTEITKAPLSASMIKRYDEHHQDLTLLKALVRQQLPEKYKEI
FFDQSKNGYAGYIDGGASQEEFYKFIKPILEKMDGTEELLVKLNREDLLR
KQRTFDNGSIPHQIHLGELHAILRRQEDFYPFLKDNREKIEKILTFRIPY
YVGPLARGNSRFAWMTRKSEETITPWNFEEVVDKGASAQSFIERMTNFDK
NLPNEKVLPKHSLLYEYFTVYNELTKVKYVTEGMRKPAFLSGEQKKAIVD
LLFKTNRKVTVKQLKEDYFKKIECFDSVEISGVEDRFNASLGTYHDLLKI
IKDKDFLDNEENEDILEDIVLTLTLFEDREMIEERLKTYAHLFDDKVMKQ
LKRRRYTGWGRLSRKLINGIRDKQSGKTILDFLKSDGFANRNFMQLIHDD
SLTFKEDIQKAQVSGQGDSLHEHIANLAGSPAIKKGILQTVKVVDELVKV
MGRHKPENIVIEMARENQTTQKGQKNSRERMKRIEEGIKELGSQILKEHP
VENTQLQNEKLYLYYLQNGRDMYVDQELDINRLSDYDVDHIVPQSFLKDD
SIDNKVLTRSDKNRGKSDNVPSEEVVKKMKNYWRQLLNAKLITQRKFDNL
TKAERGGLSELDKAGFIKRQLVETRQITKHVAQILDSRMNTKYDENDKLI
REVKVITLKSKLVSDFRKDFQFYKVREINNYHHAHDAYLNAVVGTALIKK
YPKLESEFVYGDYKVYDVRKMIAKSEQEIGKATAKYFFYSNIMNFFKTEI
TLANGEIRKRPLIETNGETGEIVWDKGRDFATVRKVLSMPQVNIVKKTEV
QTGGFSKESILPKRNSDKLIARKKDWDPKKYGGFDSPTVAYSVLVVAKVE
KGKSKKLKSVKELLGITIMERSSFEKNPIDFLEAKGYKEVKKDLIIKLPK
YSLFELENGRKRMLASAGELQKGNELALPSKYVNFLYLASHYEKLKGGSS
GSETPGTSESATPESSGSEVEFSHEYWMRHALTLAKRARDEREVPVGAVL
VLNNRVIGEGWNRAIGLHDPTAHAEIMALRQGGLVMQNYRLIDATLYVTF
EPCVMCAGAMIHSRIGRVVFGVRNAKTGAAGSLMDVLHYPGMNHRVEITE
GILADECAALLCYFFRMPRQVFNAQKKAQSSTDSPEDNEQKQLFVEQHKH
YLDEIIEQISEFSKRVILADANLDKVLSAYNKHRDKPIREQAENIIHLFT
LTNLGAPAAFKYFDTTIDRKRYTSTKEVLDATLIHQSITGLYETRIDLSQ
LGGD
107 Cas9 TadAins 1054
MDKKYSIGLAIGTNSVGWAVITDEYKVPSKKFKVLGNTDRHSIKKNLIGA
LLFDSGETAEATRLKRTARRRYTRRKNRICYLQEIFSNEMAKVDDSFFHR
LEESFLVEEDKKHERHPIFGNIVDEVAYHEKYPTIYHLRKKLVDSTDKAD
LRLIYLALAHMIKFRGHFLIEGDLNPDNSDVDKLEIQLVQTYNQLFEENP
INASGVDAKAILSARLSKSRRLENLIAQLPGEKKNGLFGNLIALSLGLTP
NFKSNFDLAEDAKLQLSKDTYDDDLDNLLAQIGDQYADLFLAAKNLSDAI
LLSDILRVNTEITKAPLSASMIKRYDEHHQDLTLLKALVRQQLPEKYKEI
FFDQSKNGYAGYIDGGASQEEFYKFIKPILEKMDGTEELLVKLNREDLLR
KQRTFDNGSIPHQIHLGELHAILRRQEDFYPFLKDNREKIEKILTFRIPY
YVGPLARGNSRFAWMTRKSEETITPWNFEEVVDKGASAQSFIERMTNFDK
NLPNEKVLPKHSLLYEYFTVYNELTKVKYVTEGMRKPAFLSGEQKKAIVD
LLFKTNRKVTVKQLKEDYFKKIECFDSVEISGVEDRFNASLGTYHDLLKI
IKDKDFLDNEENEDILEDIVLTLTLFEDREMIEERLKTYAHLFDDKVMKQ
LKRRRYTGWGRLSRKLINGIRDKQSGKTILDFLKSDGFANRNFMQLIHDD
SLTFKEDIQKAQVSGQGDSLHEHIANLAGSPAIKKGILQTVKVVDELVKV
MGRHKPENIVIEMARENQTTQKGQKNSRERMKRIEEGIKELGSQILKEHP
VENTQLQNEKLYLYYLQNGRDMYVDQELDINRLSDYDVDHIVPQSFLKDD
SIDNKVLTRSDKNRGKSDNVPSEEVVKKMKNYWRQLLNAKLITQRKFDNL
TKAERGGLSELDKAGFIKRQLVETRQITKHVAQILDSRMNTKYDENDKLI
REVKVITLKSKLVSDFRKDFQFYKVREINNYHHAHDAYLNAVVGTALIKK
YPKLESEFVYGDYKVYDVRKMIAKSEQEIGKATAKYFFYSNIMNFFKTEI
TLANGSSGSETPGTSESATPESSGSEVEFSHEYWMRHALTLAKRARDERE
VPVGAVLVLNNRVIGEGWNRAIGLHDPTAHAEIMALRQGGLVMQNYRLID
ATLYVTFEPCVMCAGAMIHSRIGRVVFGVRNAKTGAAGSLMDVLHYPGMN
HRVEITEGILADECAALLCYFFRMPRQVFNAQKKAQSSTDGEIRKRPLIE
TNGETGEIVWDKGRDFATVRKVLSMPQVNIVKKTEVQTGGFSKESILPKR
NSDKLIARKKDWDPKKYGGFDSPTVAYSVLVVAKVEKGKSKKLKSVKELL
GITIMERSSFEKNPIDFLEAKGYKEVKKDLIIKLPKYSLFELENGRKRML
ASAGELQKGNELALPSKYVNFLYLASHYEKLKGSPEDNEQKQLFVEQHKH
YLDEIIEQISEFSKRVILADANLDKVLSAYNKHRDKPIREQAENIIHLFT
LTNLGAPAAFKYFDTTIDRKRYTSTKEVLDATLIHQSITGLYETRIDLSQ
LGGD
108 Cas9 TadAins 1026
MDKKYSIGLAIGTNSVGWAVITDEYKVPSKKFKVLGNTDRHSIKKNLIGA
LLFDSGETAEATRLKRTARRRYTRRKNRICYLQEIFSNEMAKVDDSFFHR
LEESFLVEEDKKHERHPIFGNIVDEVAYHEKYPTIYHLRKKLVDSTDKAD
LRLIYLALAHMIKFRGHFLIEGDLNPDNSDVDKLEIQLVQTYNQLFEENP
INASGVDAKAILSARLSKSRRLENLIAQLPGEKKNGLFGNLIALSLGLTP
NFKSNFDLAEDAKLQLSKDTYDDDLDNLLAQIGDQYADLFLAAKNLSDAI
LLSDILRVNTEITKAPLSASMIKRYDEHHQDLTLLKALVRQQLPEKYKEI
FFDQSKNGYAGYIDGGASQEEFYKFIKPILEKMDGTEELLVKLNREDLLR
KQRTFDNGSIPHQIHLGELHAILRRQEDFYPFLKDNREKIEKILTFRIPY
YVGPLARGNSRFAWMTRKSEETITPWNFEEVVDKGASAQSFIERMTNFDK
NLPNEKVLPKHSLLYEYFTVYNELTKVKYVTEGMRKPAFLSGEQKKAIVD
LLFKTNRKVTVKQLKEDYFKKIECFDSVEISGVEDRFNASLGTYHDLLKI
IKDKDFLDNEENEDILEDIVLTLTLFEDREMIEERLKTYAHLFDDKVMKQ
LKRRRYTGWGRLSRKLINGIRDKQSGKTILDFLKSDGFANRNFMQLIHDD
SLTFKEDIQKAQVSGQGDSLHEHIANLAGSPAIKKGILQTVKVVDELVKV
MGRHKPENIVIEMARENQTTQKGQKNSRERMKRIEEGIKELGSQILKEHP
VENTQLQNEKLYLYYLQNGRDMYVDQELDINRLSDYDVDHIVPQSFLKDD
SIDNKVLTRSDKNRGKSDNVPSEEVVKKMKNYWRQLLNAKLITQRKFDNL
TKAERGGLSELDKAGFIKRQLVETRQITKHVAQILDSRMNTKYDENDKLI
REVKVITLKSKLVSDFRKDFQFYKVREINNYHHAHDAYLNAVVGTALIKK
YPKLESEFVYGDYKVYDVRKMIAKSEGSSGSETPGTSESATPESSGSEVE
FSHEYWMRHALTLAKRARDEREVPVGAVLVLNNRVIGEGWNRAIGLHDPT
AHAEIMALRQGGLVMQNYRLIDATLYVTFEPCVMCAGAMIHSRIGRVVFG
VRNAKTGAAGSLMDVLHYPGMNHRVEITEGILADECAALLCYFFRMPRQV
FNAQKKAQSSTDQEIGKATAKYFFYSNIMNFFKTEITLANGEIRKRPLIE
TNGETGEIVWDKGRDFATVRKVLSMPQVNIVKKTEVQTGGFSKESILPKR
NSDKLIARKKDWDPKKYGGFDSPTVAYSVLVVAKVEKGKSKKLKSVKELL
GITIMERSSFEKNPIDFLEAKGYKEVKKDLIIKLPKYSLFELENGRKRML
ASAGELQKGNELALPSKYVNFLYLASHYEKLKGSPEDNEQKQLFVEQHKH
YLDEIIEQISEFSKRVILADANLDKVLSAYNKHRDKPIREQAENIIHLFT
LTNLGAPAAFKYFDTTIDRKRYTSTKEVLDATLIHQSITGLYETRIDLSQ
LGGD
109 Cas9 TadAins 768
MDKKYSIGLAIGTNSVGWAVITDEYKVPSKKFKVLGNTDRHSIKKNLIGA
LLFDSGETAEATRLKRTARRRYTRRKNRICYLQEIFSNEMAKVDDSFFHR
LEESFLVEEDKKHERHPIFGNIVDEVAYHEKYPTIYHLRKKLVDSTDKAD
LRLIYLALAHMIKFRGHFLIEGDLNPDNSDVDKLEIQLVQTYNQLFEENP
INASGVDAKAILSARLSKSRRLENLIAQLPGEKKNGLFGNLIALSLGLTP
NFKSNFDLAEDAKLQLSKDTYDDDLDNLLAQIGDQYADLFLAAKNLSDAI
LLSDILRVNTEITKAPLSASMIKRYDEHHQDLTLLKALVRQQLPEKYKEI
FFDQSKNGYAGYIDGGASQEEFYKFIKPILEKMDGTEELLVKLNREDLLR
KQRTFDNGSIPHQIHLGELHAILRRQEDFYPFLKDNREKIEKILTFRIPY
YVGPLARGNSRFAWMTRKSEETITPWNFEEVVDKGASAQSFIERMTNFDK
NLPNEKVLPKHSLLYEYFTVYNELTKVKYVTEGMRKPAFLSGEQKKAIVD
LLFKTNRKVTVKQLKEDYFKKIECFDSVEISGVEDRFNASLGTYHDLLKI
IKDKDFLDNEENEDILEDIVLTLTLFEDREMIEERLKTYAHLFDDKVMKQ
LKRRRYTGWGRLSRKLINGIRDKQSGKTILDFLKSDGFANRNFMQLIHDD
SLTFKEDIQKAQVSGQGDSLHEHIANLAGSPAIKKGILQTVKVVDELVKV
MGRHKPENIVIEMARENQGSSGSETPGTSESATPESSGSEVEFSHEYWMR
HALTLAKRARDEREVPVGAVLVLNNRVIGEGWNRAIGLHDPTAHAEIMAL
RQGGLVMQNYRLIDATLYVTFEPCVMCAGAMIHSRIGRVVFGVRNAKTGA
AGSLMDVLHYPGMNHRVEITEGILADECAALLCYFFRMPRTTQKGQKNSR
ERMKRIEEGIKELGSQILKEHPVENTQLQNEKLYLYYLQNGRDMYVDQEL
DINRLSDYDVDHIVPQSFLKDDSIDNKVLTRSDKNRGKSDNVPSEEVVKK
MKNYWRQLLNAKLITQRKFDNLTKAERGGLSELDKAGFIKRQLVETRQIT
KHVAQILDSRMNTKYDENDKLIREVKVITLKSKLVSDFRKDFQFYKVREI
NNYHHAHDAYLNAVVGTALIKKYPKLESEFVYGDYKVYDVRKMIAKSEQE
IGKATAKYFFYSNIMNFFKTEITLANGEIRKRPLIETNGETGEIVWDKGR
DFATVRKVLSMPQVNIVKKTEVQTGGFSKESILPKRNSDKLIARKKDWDP
KKYGGFDSPTVAYSVLVVAKVEKGKSKKLKSVKELLGITIMERSSFEKNP
IDFLEAKGYKEVKKDLIIKLPKYSLFELENGRKRMLASAGELQKGNELAL
PSKYVNFLYLASHYEKLKGSPEDNEQKQLFVEQHKHYLDEIIEQISEFSK
RVILADANLDKVLSAYNKHRDKPIREQAENIIHLFTLTNLGAPAAFKYFD
TTIDRKRYTSTKEVLDATLIHQSITGLYETRIDLSQLGGD
110.1 Cas9 TadAins 1250
MDKKYSIGLAIGTNSVGWAVITDEYKVPSKKFKVLGNTDRHSIKKNLIGA
LLFDSGETAEATRLKRTARRRYTRRKNRICYLQEIFSNEMAKVDDSFFHR
LEESFLVEEDKKHERHPIFGNIVDEVAYHEKYPTIYHLRKKLVDSTDKAD
LRLIYLALAHMIKFRGHFLIEGDLNPDNSDVDKLFIQLVQTYNQLFEENP
INASGVDAKAILSARLSKSRRLENLIAQLPGEKKNGLFGNLIALSLGLTP
NFKSNFDLAEDAKLQLSKDTYDDDLDNLLAQIGDQYADLFLAAKNLSDAI
LLSDILRVNTEITKAPLSASMIKRYDEHHQDLTLLKALVRQQLPEKYKEI
FFDQSKNGYAGYIDGGASQEEFYKFIKPILEKMDGTEELLVKLNREDLLR
KQRTFDNGSIPHQIHLGELHAILRRQEDFYPFLKDNREKIEKILTFRIPY
YVGPLARGNSRFAWMTRKSEETITPWNFEEVVDKGASAQSFIERMTNFDK
NLPNEKVLPKHSLLYEYFTVYNELTKVKYVTEGMRKPAFLSGEQKKAIVD
LLFKTNRKVTVKQLKEDYFKKIECFDSVEISGVEDRFNASLGTYHDLLKI
IKDKDFLDNEENEDILEDIVLTLTLFEDREMIEERLKTYAHLFDDKVMKQ
LKRRRYTGWGRLSRKLINGIRDKQSGKTILDFLKSDGFANRNFMQLIHDD
SLTFKEDIQKAQVSGQGDSLHEHIANLAGSPAIKKGILQTVKVVDELVKV
MGRHKPENIVIEMARENQTTQKGQKNSRERMKRIEEGIKELGSQILKEHP
VENTQLQNEKLYLYYLQNGRDMYVDQELDINRLSDYDVDHIVPQSFLKDD
SIDNKVLTRSDKNRGKSDNVPSEEVVKKMKNYWRQLLNAKLITQRKFDNL
TKAERGGLSELDKAGFIKRQLVETRQITKHVAQILDSRMNTKYDENDKLI
REVKVITLKSKLVSDFRKDFQFYKVREINNYHHAHDAYLNAVVGTALIKK
YPKLESEFVYGDYKVYDVRKMIAKSEQEIGKATAKYFFYSNIMNFFKTEI
TLANGEIRKRPLIETNGETGEIVWDKGRDFATVRKVLSMPQVNIVKKTEV
QTGGFSKESILPKRNSDKLIARKKDWDPKKYGGFDSPTVAYSVLVVAKVE
KGKSKKLKSVKELLGITIMERSSFEKNPIDFLEAKGYKEVKKDLIIKLPK
YSLFELENGRKRMLASAGELQKGNELALPSKYVNFLYLASHYEKLKGSPG
SSGSETPGTSESATPESSGSEVEFSHEYWMRHALTLAKRARDEREVPVGA
VLVLNNRVIGEGWNRAIGLHDPTAHAEIMALRQGGLVMQNYRLIDATLYV
TFEPCVMCAGAMIHSRIGRVVFGVRNAKTGAAGSLMDVLHYPGMNHRVEI
TEGILADECAALLCYFFRMPREDNEQKQLFVEQHKHYLDEIIEQISEFSK
RVILADANLDKVLSAYNKHRDKPIREQAENIIHLFTLTNLGAPAAFKYFD
TTIDRKRYTSTKEVLDATLIHQSITGLYETRIDLSQLGGD
110.2 Cas9 TadAins 1250
MDKKYSIGLAIGTNSVGWAVITDEYKVPSKKFKVLGNTDRHSIKKNLIGA
LLFDSGETAEATRLKRTARRRYTRRKNRICYLQEIFSNEMAKVDDSFFHR
LEESFLVEEDKKHERHPIFGNIVDEVAYHEKYPTIYHLRKKLVDSTDKAD
LRLIYLALAHMIKFRGHFLIEGDLNPDNSDVDKLFIQLVQTYNQLFEENP
INASGVDAKAILSARLSKSRRLENLIAQLPGEKKNGLFGNLIALSLGLTP
NFKSNFDLAEDAKLQLSKDTYDDDLDNLLAQIGDQYADLFLAAKNLSDAI
LLSDILRVNTEITKAPLSASMIKRYDEHHQDLTLLKALVRQQLPEKYKEI
FFDQSKNGYAGYIDGGASQEEFYKFIKPILEKMDGTEELLVKLNREDLLR
KQRTFDNGSIPHQIHLGELHAILRRQEDFYPFLKDNREKIEKILTFRIPY
YVGPLARGNSRFAWMTRKSEETITPWNFEEVVDKGASAQSFIERMTNFDK
NLPNEKVLPKHSLLYEYFTVYNELTKVKYVTEGMRKPAFLSGEQKKAIVD
LLFKTNRKVTVKQLKEDYFKKIECFDSVEISGVEDRFNASLGTYHDLLKI
IKDKDFLDNEENEDILEDIVLTLTLFEDREMIEERLKTYAHLFDDKVMKQ
LKRRRYTGWGRLSRKLINGIRDKQSGKTILDFLKSDGFANRNFMQLIHDD
SLTFKEDIQKAQVSGQGDSLHEHIANLAGSPAIKKGILQTVKVVDELVKV
MGRHKPENIVIEMARENQTTQKGQKNSRERMKRIEEGIKELGSQILKEHP
VENTQLQNEKLYLYYLQNGRDMYVDQELDINRLSDYDVDHIVPQSFLKDD
SIDNKVLTRSDKNRGKSDNVPSEEVVKKMKNYWRQLLNAKLITQRKFDNL
TKAERGGLSELDKAGFIKRQLVETRQITKHVAQILDSRMNTKYDENDKLI
REVKVITLKSKLVSDFRKDFQFYKVREINNYHHAHDAYLNAVVGTALIKK
YPKLESEFVYGDYKVYDVRKMIAKSEQEIGKATAKYFFYSNIMNFFKTEI
TLANGEIRKRPLIETNGETGEIVWDKGRDFATVRKVLSMPQVNIVKKTEV
QTGGFSKESILPKRNSDKLIARKKDWDPKKYGGFDSPTVAYSVLVVAKVE
KGKSKKLKSVKELLGITIMERSSFEKNPIDFLEAKGYKEVKKDLIIKLPK
YSLFELENGRKRMLASAGELQKGNELALPSKYVNFLYLASHYEKLKGSPG
SSGSSGSETPGTSESATPESSGSEVEFSHEYWMRHALTLAKRARDEREVP
VGAVLVLNNRVIGEGWNRAIGLHDPTAHAEIMALRQGGLVMQNYRLIDAT
LYVTFEPCVMCAGAMIHSRIGRVVFGVRNAKTGAAGSLMDVLHYPGMNHR
VEITEGILADECAALLCYFFRMPREDNEQKQLFVEQHKHYLDEIIEQISE
FSKRVILADANLDKVLSAYNKHRDKPIREQAENIIHLFTLTNLGAPAAFK
YFDTTIDRKRYTSTKEVLDATLIHQSITGLYETRIDLSQLGGD
110.3 Cas9 TadAins 1250
MDKKYSIGLAIGTNSVGWAVITDEYKVPSKKFKVLGNTDRHSIKKNLIGA
LLFDSGETAEATRLKRTARRRYTRRKNRICYLQEIFSNEMAKVDDSFFHR
LEESFLVEEDKKHERHPIFGNIVDEVAYHEKYPTIYHLRKKLVDSTDKAD
LRLIYLALAHMIKFRGHFLIEGDLNPDNSDVDKLFIQLVQTYNQLFEENP
INASGVDAKAILSARLSKSRRLENLIAQLPGEKKNGLFGNLIALSLGLTP
NFKSNFDLAEDAKLQLSKDTYDDDLDNLLAQIGDQYADLFLAAKNLSDAI
LLSDILRVNTEITKAPLSASMIKRYDEHHQDLTLLKALVRQQLPEKYKEI
FFDQSKNGYAGYIDGGASQEEFYKFIKPILEKMDGTEELLVKLNREDLLR
KQRTFDNGSIPHQIHLGELHAILRRQEDFYPFLKDNREKIEKILTFRIPY
YVGPLARGNSRFAWMTRKSEETITPWNFEEVVDKGASAQSFIERMTNFDK
NLPNEKVLPKHSLLYEYFTVYNELTKVKYVTEGMRKPAFLSGEQKKAIVD
LLFKTNRKVTVKQLKEDYFKKIECFDSVEISGVEDRFNASLGTYHDLLKI
IKDKDFLDNEENEDILEDIVLTLTLFEDREMIEERLKTYAHLFDDKVMKQ
LKRRRYTGWGRLSRKLINGIRDKQSGKTILDFLKSDGFANRNFMQLIHDD
SLTFKEDIQKAQVSGQGDSLHEHIANLAGSPAIKKGILQTVKVVDELVKV
MGRHKPENIVIEMARENQTTQKGQKNSRERMKRIEEGIKELGSQILKEHP
VENTQLQNEKLYLYYLQNGRDMYVDQELDINRLSDYDVDHIVPQSFLKDD
SIDNKVLTRSDKNRGKSDNVPSEEVVKKMKNYWRQLLNAKLITQRKFDNL
TKAERGGLSELDKAGFIKRQLVETRQITKHVAQILDSRMNTKYDENDKLI
REVKVITLKSKLVSDFRKDFQFYKVREINNYHHAHDAYLNAVVGTALIKK
YPKLESEFVYGDYKVYDVRKMIAKSEQEIGKATAKYFFYSNIMNFFKTEI
TLANGEIRKRPLIETNGETGEIVWDKGRDFATVRKVLSMPQVNIVKKTEV
QTGGFSKESILPKRNSDKLIARKKDWDPKKYGGFDSPTVAYSVLVVAKVE
KGKSKKLKSVKELLGITIMERSSFEKNPIDFLEAKGYKEVKKDLIIKLPK
YSLFELENGRKRMLASAGELQKGNELALPSKYVNFLYLASHYEKLKGSPG
SSGSSGSETPGTSESATPESGSSSGSEVEFSHEYWMRHALTLAKRARDER
EVPVGAVLVLNNRVIGEGWNRAIGLHDPTAHAEIMALRQGGLVMQNYRLI
DATLYVTFEPCVMCAGAMIHSRIGRVVFGVRNAKTGAAGSLMDVLHYPGM
NHRVEITEGILADECAALLCYFFRMPREDNEQKQLFVEQHKHYLDEIIEQ
ISEFSKRVILADANLDKVLSAYNKHRDKPIREQAENIIHLFTLTNLGAPA
AFKYFDTTIDRKRYTSTKEVLDATLIHQSITGLYETRIDLSQLGGD
110.4 Cas9 TadAins 1250
MDKKYSIGLAIGTNSVGWAVITDEYKVPSKKFKVLGNTDRHSIKKNLIGA
LLFDSGETAEATRLKRTARRRYTRRKNRICYLQEIFSNEMAKVDDSFFHR
LEESFLVEEDKKHERHPIFGNIVDEVAYHEKYPTIYHLRKKLVDSTDKAD
LRLIYLALAHMIKFRGHFLIEGDLNPDNSDVDKLFIQLVQTYNQLFEENP
INASGVDAKAILSARLSKSRRLENLIAQLPGEKKNGLFGNLIALSLGLTP
NFKSNFDLAEDAKLQLSKDTYDDDLDNLLAQIGDQYADLFLAAKNLSDAI
LLSDILRVNTEITKAPLSASMIKRYDEHHQDLTLLKALVRQQLPEKYKEI
FFDQSKNGYAGYIDGGASQEEFYKFIKPILEKMDGTEELLVKLNREDLLR
KQRTFDNGSIPHQIHLGELHAILRRQEDFYPFLKDNREKIEKILTFRIPY
YVGPLARGNSRFAWMTRKSEETITPWNFEEVVDKGASAQSFIERMTNFDK
NLPNEKVLPKHSLLYEYFTVYNELTKVKYVTEGMRKPAFLSGEQKKAIVD
LLFKTNRKVTVKQLKEDYFKKIECFDSVEISGVEDRFNASLGTYHDLLKI
IKDKDFLDNEENEDILEDIVLTLTLFEDREMIEERLKTYAHLFDDKVMKQ
LKRRRYTGWGRLSRKLINGIRDKQSGKTILDFLKSDGFANRNFMQLIHDD
SLTFKEDIQKAQVSGQGDSLHEHIANLAGSPAIKKGILQTVKVVDELVKV
MGRHKPENIVIEMARENQTTQKGQKNSRERMKRIEEGIKELGSQILKEHP
VENTQLQNEKLYLYYLQNGRDMYVDQELDINRLSDYDVDHIVPQSFLKDD
SIDNKVLTRSDKNRGKSDNVPSEEVVKKMKNYWRQLLNAKLITQRKFDNL
TKAERGGLSELDKAGFIKRQLVETRQITKHVAQILDSRMNTKYDENDKLI
REVKVITLKSKLVSDFRKDFQFYKVREINNYHHAHDAYLNAVVGTALIKK
YPKLESEFVYGDYKVYDVRKMIAKSEQEIGKATAKYFFYSNIMNFFKTEI
TLANGEIRKRPLIETNGETGEIVWDKGRDFATVRKVLSMPQVNIVKKTEV
QTGGFSKESILPKRNSDKLIARKKDWDPKKYGGFDSPTVAYSVLVVAKVE
KGKSKKLKSVKELLGITIMERSSFEKNPIDFLEAKGYKEVKKDLIIKLPK
YSLFELENGRKRMLASAGELQKGNELALPSKYVNFLYLASHYEKLKGSPG
SSGSSGSETPGTSESATPESGSSSGSEVEFSHEYWMRHALTLAKRARDER
EVPVGAVLVLNNRVIGEGWNRAIGLHDPTAHAEIMALRQGGLVMQNYRLI
DATLYVTFEPCVMCAGAMIHSRIGRVVFGVRNAKTGAAGSLMDVLHYPGM
NHRVEITEGILADECAALLCYFFRMRREDNEQKQLFVEQHKHYLDEIIEQ
ISEFSKRVILADANLDKVLSAYNKHRDKPIREQAENIIHLFTLTNLGAPA
AFKYFDTTIDRKRYTSTKEVLDATLIHQSITGLYETRIDLSQLGGD
110.5 Cas9 TadAins 1249
MDKKYSIGLAIGTNSVGWAVITDEYKVPSKKFKVLGNTDRHSIKKNLIGA
LLFDSGETAEATRLKRTARRRYTRRKNRICYLQEIFSNEMAKVDDSFFHR
LEESFLVEEDKKHERHPIFGNIVDEVAYHEKYPTIYHLRKKLVDSTDKAD
LRLIYLALAHMIKFRGHFLIEGDLNPDNSDVDKLFIQLVQTYNQLFEENP
INASGVDAKAILSARLSKSRRLENLIAQLPGEKKNGLFGNLIALSLGLTP
NFKSNFDLAEDAKLQLSKDTYDDDLDNLLAQIGDQYADLFLAAKNLSDAI
LLSDILRVNTEITKAPLSASMIKRYDEHHQDLTLLKALVRQQLPEKYKEI
FFDQSKNGYAGYIDGGASQEEFYKFIKPILEKMDGTEELLVKLNREDLLR
KQRTFDNGSIPHQIHLGELHAILRRQEDFYPFLKDNREKIEKILTFRIPY
YVGPLARGNSRFAWMTRKSEETITPWNFEEVVDKGASAQSFIERMTNFDK
NLPNEKVLPKHSLLYEYFTVYNELTKVKYVTEGMRKPAFLSGEQKKAIVD
LLFKTNRKVTVKQLKEDYFKKIECFDSVEISGVEDRFNASLGTYHDLLKI
IKDKDFLDNEENEDILEDIVLTLTLFEDREMIEERLKTYAHLFDDKVMKQ
LKRRRYTGWGRLSRKLINGIRDKQSGKTILDFLKSDGFANRNFMQLIHDD
SLTFKEDIQKAQVSGQGDSLHEHIANLAGSPAIKKGILQTVKVVDELVKV
MGRHKPENIVIEMARENQTTQKGQKNSRERMKRIEEGIKELGSQILKEHP
VENTQLQNEKLYLYYLQNGRDMYVDQELDINRLSDYDVDHIVPQSFLKDD
SIDNKVLTRSDKNRGKSDNVPSEEVVKKMKNYWRQLLNAKLITQRKFDNL
TKAERGGLSELDKAGFIKRQLVETRQITKHVAQILDSRMNTKYDENDKLI
REVKVITLKSKLVSDFRKDFQFYKVREINNYHHAHDAYLNAVVGTALIKK
YPKLESEFVYGDYKVYDVRKMIAKSEQEIGKATAKYFFYSNIMNFFKTEI
TLANGEIRKRPLIETNGETGEIVWDKGRDFATVRKVLSMPQVNIVKKTEV
QTGGFSKESILPKRNSDKLIARKKDWDPKKYGGFDSPTVAYSVLVVAKVE
KGKSKKLKSVKELLGITIMERSSFEKNPIDFLEAKGYKEVKKDLIIKLPK
YSLFELENGRKRMLASAGELQKGNELALPSKYVNFLYLASHYEKLKGSGS
SGSSGSETPGTSESATPESGSSSGSEVEFSHEYWMRHALTLAKRARDERE
VPVGAVLVLNNRVIGEGWNRAIGLHDPTAHAEIMALRQGGLVMQNYRLID
ATLYVTFEPCVMCAGAMIHSRIGRVVFGVRNAKTGAAGSLMDVLHYPGMN
HRVEITEGILADECAALLCYFFRMRRPEDNEQKQLFVEQHKHYLDEIIEQ
ISEFSKRVILADANLDKVLSAYNKHRDKPIREQAENIIHLFTLTNLGAPA
AFKYFDTTIDRKRYTSTKEVLDATLIHQSITGLYETRIDLSQLGGD
110.5 Cas9 TadAins delta 59-66 1250
MDKKYSIGLAIGTNSVGWAVITDEYKVPSKKFKVLGNTDRHSIKKNLIGA
LLFDSGETAEATRLKRTARRRYTRRKNRICYLQEIFSNEMAKVDDSFFHR
LEESFLVEEDKKHERHPIFGNIVDEVAYHEKYPTIYHLRKKLVDSTDKAD
LRLIYLALAHMIKFRGHFLIEGDLNPDNSDVDKLFIQLVQTYNQLFEENP
INASGVDAKAILSARLSKSRRLENLIAQLPGEKKNGLFGNLIALSLGLTP
NFKSNFDLAEDAKLQLSKDTYDDDLDNLLAQIGDQYADLFLAAKNLSDAI
LLSDILRVNTEITKAPLSASMIKRYDEHHQDLTLLKALVRQQLPEKYKEI
FFDQSKNGYAGYIDGGASQEEFYKFIKPILEKMDGTEELLVKLNREDLLR
KQRTFDNGSIPHQIHLGELHAILRRQEDFYPFLKDNREKIEKILTFRIPY
YVGPLARGNSRFAWMTRKSEETITPWNFEEVVDKGASAQSFIERMTNEDK
NLPNEKVLPKHSLLYEYFTVYNELTKVKYVTEGMRKPAFLSGEQKKAIVD
LLFKTNRKVTVKQLKEDYFKKIECFDSVEISGVEDRFNASLGTYHDLLKI
IKDKDFLDNEENEDILEDIVLTLTLFEDREMIEERLKTYAHLFDDKVMKQ
LKRRRYTGWGRLSRKLINGIRDKQSGKTILDFLKSDGFANRNFMQLIHDD
SLTFKEDIQKAQVSGQGDSLHEHIANLAGSPAIKKGILQTVKVVDELVKV
MGRHKPENIVIEMARENQTTQKGQKNSRERMKRIEEGIKELGSQILKEHP
VENTQLQNEKLYLYYLQNGRDMYVDQELDINRLSDYDVDHIVPQSFLKDD
SIDNKVLTRSDKNRGKSDNVPSEEVVKKMKNYWRQLLNAKLITQRKFDNL
TKAERGGLSELDKAGFIKRQLVETRQITKHVAQILDSRMNTKYDENDKLI
REVKVITLKSKLVSDFRKDFQFYKVREINNYHHAHDAYLNAVVGTALIKK
YPKLESEFVYGDYKVYDVRKMIAKSEQEIGKATAKYFFYSNIMNFFKTEI
TLANGEIRKRPLIETNGETGEIVWDKGRDFATVRKVLSMPQVNIVKKTEV
QTGGFSKESILPKRNSDKLIARKKDWDPKKYGGFDSPTVAYSVLVVAKVE
KGKSKKLKSVKELLGITIMERSSFEKNPIDFLEAKGYKEVKKDLIIKLPK
YSLFELENGRKRMLASAGELQKGNELALPSKYVNFLYLASHYEKLKGSPG
SSGSSGSETPGTSESATPESGSSGSEVEFSHEYWMRHALTLAKRARDERE
VPVGAVLVLNNRVIGEGWNRAHAEIMALRQGGLVMQNYRLIDATLYVTFE
PCVMCAGAMIHSRIGRVVFGVRNARTGAAGSLMDVLHYPGMNHRVEITEG
ILADECAALLCYFFRMPRQVFNAQKKAQSSTDEDNEQKQLFVEQHKHYLD
EIIEQISEFSKRVILADANLDKVLSAYNKHRDKPIREQAENIIHLFTLTN
LGAPAAFKYFDTTIDRKRYTSTKEVLDATLIHQSITGLYETRIDLSQLGG
D
110.6 Cas9 TadAins 1251
MDKKYSIGLAIGTNSVGWAVITDEYKVPSKKFKVLGNTDRHSIKKNLIGA
LLFDSGETAEATRLKRTARRRYTRRKNRICYLQEIFSNEMAKVDDSFFHR
LEESFLVEEDKKHERHPIFGNIVDEVAYHEKYPTIYHLRKKLVDSTDKAD
LRLIYLALAHMIKFRGHFLIEGDLNPDNSDVDKLFIQLVQTYNQLFEENP
INASGVDAKAILSARLSKSRRLENLIAQLPGEKKNGLFGNLIALSLGLTP
NFKSNFDLAEDAKLQLSKDTYDDDLDNLLAQIGDQYADLFLAAKNLSDAI
LLSDILRVNTEITKAPLSASMIKRYDEHHQDLTLLKALVRQQLPEKYKEI
FFDQSKNGYAGYIDGGASQEEFYKFIKPILEKMDGTEELLVKLNREDLLR
KQRTFDNGSIPHQIHLGELHAILRRQEDFYPFLKDNREKIEKILTFRIPY
YVGPLARGNSRFAWMTRKSEETITPWNFEEVVDKGASAQSFIERMTNEDK
NLPNEKVLPKHSLLYEYFTVYNELTKVKYVTEGMRKPAFLSGEQKKAIVD
LLFKTNRKVTVKQLKEDYFKKIECFDSVEISGVEDRFNASLGTYHDLLKI
IKDKDFLDNEENEDILEDIVLTLTLFEDREMIEERLKTYAHLFDDKVMKQ
LKRRRYTGWGRLSRKLINGIRDKQSGKTILDFLKSDGFANRNFMQLIHDD
SLTFKEDIQKAQVSGQGDSLHEHIANLAGSPAIKKGILQTVKVVDELVKV
MGRHKPENIVIEMARENQTTQKGQKNSRERMKRIEEGIKELGSQILKEHP
VENTQLQNEKLYLYYLQNGRDMYVDQELDINRLSDYDVDHIVPQSFLKDD
SIDNKVLTRSDKNRGKSDNVPSEEVVKKMKNYWRQLLNAKLITQRKFDNL
TKAERGGLSELDKAGFIKRQLVETRQITKHVAQILDSRMNTKYDENDKLI
REVKVITLKSKLVSDFRKDFQFYKVREINNYHHAHDAYLNAVVGTALIKK
YPKLESEFVYGDYKVYDVRKMIAKSEQEIGKATAKYFFYSNIMNFFKTEI
TLANGEIRKRPLIETNGETGEIVWDKGRDFATVRKVLSMPQVNIVKKTEV
QTGGFSKESILPKRNSDKLIARKKDWDPKKYGGFDSPTVAYSVLVVAKVE
KGKSKKLKSVKELLGITIMERSSFEKNPIDFLEAKGYKEVKKDLIIKLPK
YSLFELENGRKRMLASAGELQKGNELALPSKYVNFLYLASHYEKLKGSPE
GSSGSSGSETPGTSESATPESGSSSGSEVEFSHEYWMRHALTLAKRARDE
REVPVGAVLVLNNRVIGEGWNRAIGLHDPTAHAEIMALRQGGLVMQNYRL
IDATLYVTFEPCVMCAGAMIHSRIGRVVFGVRNAKTGAAGSLMDVLHYPG
MNHRVEITEGILADECAALLCYFFRMRRDNEQKQLFVEQHKHYLDEIIEQ
ISEFSKRVILADANLDKVLSAYNKHRDKPIREQAENIIHLFTLTNLGAPA
AFKYFDTTIDRKRYTSTKEVLDATLIHQSITGLYETRIDLSQLGGD
110.7 Cas9 TadAins 1252
MDKKYSIGLAIGTNSVGWAVITDEYKVPSKKFKVLGNTDRHSIKKNLIGA
LLFDSGETAEATRLKRTARRRYTRRKNRICYLQEIFSNEMAKVDDSFFHR
LEESFLVEEDKKHERHPIFGNIVDEVAYHEKYPTIYHLRKKLVDSTDKAD
LRLIYLALAHMIKFRGHFLIEGDLNPDNSDVDKLFIQLVQTYNQLFEENP
INASGVDAKAILSARLSKSRRLENLIAQLPGEKKNGLFGNLIALSLGLTP
NFKSNFDLAEDAKLQLSKDTYDDDLDNLLAQIGDQYADLFLAAKNLSDAI
LLSDILRVNTEITKAPLSASMIKRYDEHHQDLTLLKALVRQQLPEKYKEI
FFDQSKNGYAGYIDGGASQEEFYKFIKPILEKMDGTEELLVKLNREDLLR
KQRTFDNGSIPHQIHLGELHAILRRQEDFYPFLKDNREKIEKILTFRIPY
YVGPLARGNSRFAWMTRKSEETITPWNFEEVVDKGASAQSFIERMTNFDK
NLPNEKVLPKHSLLYEYETVYNELTKVKYVTEGMRKPAFLSGEQKKAIVD
LLFKTNRKVTVKQLKEDYFKKIECFDSVEISGVEDRFNASLGTYHDLLKI
IKDKDFLDNEENEDILEDIVLTLTLFEDREMIEERLKTYAHLFDDKVMKQ
LKRRRYTGWGRLSRKLINGIRDKQSGKTILDFLKSDGFANRNFMQLIHDD
SLTFKEDIQKAQVSGQGDSLHEHIANLAGSPAIKKGILQTVKVVDELVKV
MGRHKPENIVIEMARENQTTQKGQKNSRERMKRIEEGIKELGSQILKEHP
VENTQLQNEKLYLYYLQNGRDMYVDQELDINRLSDYDVDHIVPQSFLKDD
SIDNKVLTRSDKNRGKSDNVPSEEVVKKMKNYWRQLLNAKLITQRKFDNL
TKAERGGLSELDKAGFIKRQLVETRQITKHVAQILDSRMNTKYDENDKLI
REVKVITLKSKLVSDFRKDFQFYKVREINNYHHAHDAYLNAVVGTALIKK
YPKLESEFVYGDYKVYDVRKMIAKSEQEIGKATAKYFFYSNIMNFFKTEI
TLANGEIRKRPLIETNGETGEIVWDKGRDFATVRKVLSMPQVNIVKKTEV
QTGGFSKESILPKRNSDKLIARKKDWDPKKYGGFDSPTVAYSVLVVAKVE
KGKSKKLKSVKELLGITIMERSSFEKNPIDFLEAKGYKEVKKDLIIKLPK
YSLFELENGRKRMLASAGELQKGNELALPSKYVNFLYLASHYEKLKGSPE
DGSSGSSGSETPGTSESATPESGSSSGSEVEFSHEYWMRHALTLAKRARD
EREVPVGAVLVLNNRVIGEGWNRAIGLHDPTAHAEIMALRQGGLVMQNYR
LIDATLYVTFEPCVMCAGAMIHSRIGRVVFGVRNAKTGAAGSLMDVLHYP
GMNHRVEITEGILADECAALLCYFFRMRRNEQKQLFVEQHKHYLDEIIEQ
ISEFSKRVILADANLDKVLSAYNKHRDKPIREQAENIIHLFTLTNLGAPA
AFKYFDTTIDRKRYTSTKEVLDATLIHQSITGLYETRIDLSQLGGD
110.8 Cas9 TadAins delta 59-66 C-truncate 1250
MDKKYSIGLAIGTNSVGWAVITDEYKVPSKKFKVLGNTDRHSIKKNLIGA
LLFDSGETAEATRLKRTARRRYTRRKNRICYLQEIFSNEMAKVDDSFFHR
LEESFLVEEDKKHERHPIFGNIVDEVAYHEKYPTIYHLRKKLVDSTDKAD
LRLIYLALAHMIKFRGHFLIEGDLNPDNSDVDKLFIQLVQTYNQLFEENP
INASGVDAKAILSARLSKSRRLENLIAQLPGEKKNGLFGNLIALSLGLTP
NFKSNFDLAEDAKLQLSKDTYDDDLDNLLAQIGDQYADLFLAAKNLSDAI
LLSDILRVNTEITKAPLSASMIKRYDEHHQDLTLLKALVRQQLPEKYKEI
FFDQSKNGYAGYIDGGASQEEFYKFIKPILEKMDGTEELLVKLNREDLLR
KQRTFDNGSIPHQIHLGELHAILRRQEDFYPFLKDNREKIEKILTFRIPY
YVGPLARGNSRFAWMTRKSEETITPWNFEEVVDKGASAQSFIERMTNFDK
NLPNEKVLPKHSLLYEYFTVYNELTKVKYVTEGMRKPAFLSGEQKKAIVD
LLFKTNRKVTVKQLKEDYFKKIECFDSVEISGVEDRFNASLGTYHDLLKI
IKDKDFLDNEENEDILEDIVLTLTLFEDREMIEERLKTYAHLFDDKVMKQ
LKRRRYTGWGRLSRKLINGIRDKQSGKTILDFLKSDGFANRNFMQLIHDD
SLTFKEDIQKAQVSGQGDSLHEHIANLAGSPAIKKGILQTVKVVDELVKV
MGRHKPENIVIEMARENQTTQKGQKNSRERMKRIEEGIKELGSQILKEHP
VENTQLQNEKLYLYYLQNGRDMYVDQELDINRLSDYDVDHIVPQSFLKDD
SIDNKVLTRSDKNRGKSDNVPSEEVVKKMKNYWRQLLNAKLITQRKFDNL
TKAERGGLSELDKAGFIKRQLVETRQITKHVAQILDSRMNTKYDENDKLI
REVKVITLKSKLVSDFRKDFQFYKVREINNYHHAHDAYLNAVVGTALIKK
YPKLESEFVYGDYKVYDVRKMIAKSEQEIGKATAKYFFYSNIMNFFKTEI
TLANGEIRKRPLIETNGETGEIVWDKGRDFATVRKVLSMPQVNIVKKTEV
QTGGFSKESILPKRNSDKLIARKKDWDPKKYGGFDSPTVAYSVLVVAKVE
KGKSKKLKSVKELLGITIMERSSFEKNPIDFLEAKGYKEVKKDLIIKLPK
YSLFELENGRKRMLASAGELQKGNELALPSKYVNFLYLASHYEKLKGSPG
SSGSETPGTSESATPESSGSEVEFSHEYWMRHALTLAKRARDEREVPVGA
VLVLNNRVIGEGWNRAHAEIMALRQGGLVMQNYRLIDATLYVTFEPCVMC
AGAMIHSRIGRVVFGVRNAKTGAAGSLMDVLHYPGMNHRVEITEGILADE
CAALLCYFFRMPRQEDNEQKQLFVEQHKHYLDEIIEQISEFSKRVILADA
NLDKVLSAYNKHRDKPIREQAENIIHLFTLTNLGAPAAFKYFDTTIDRKR
YTSTKEVLDATLIHQSITGLYETRIDLSQLGGD
111.1 Cas9 TadAins 997
MDKKYSIGLAIGTNSVGWAVITDEYKVPSKKFKVLGNTDRHSIKKNLIGA
LLFDSGETAEATRLKRTARRRYTRRKNRICYLQEIFSNEMAKVDDSFFHR
LEESFLVEEDKKHERHPIFGNIVDEVAYHEKYPTIYHLRKKLVDSTDKAD
LRLIYLALAHMIKFRGHFLIEGDLNPDNSDVDKLFIQLVQTYNQLFEENP
INASGVDAKAILSARLSKSRRLENLIAQLPGEKKNGLFGNLIALSLGLTP
NFKSNFDLAEDAKLQLSKDTYDDDLDNLLAQIGDQYADLFLAAKNLSDAI
LLSDILRVNTEITKAPLSASMIKRYDEHHQDLTLLKALVRQQLPEKYKEI
FFDQSKNGYAGYIDGGASQEEFYKFIKPILEKMDGTEELLVKLNREDLLR
KQRTFDNGSIPHQIHLGELHAILRRQEDFYPFLKDNREKIEKILTFRIPY
YVGPLARGNSRFAWMTRKSEETITPWNFEEVVDKGASAQSFIERMTNFDK
NLPNEKVLPKHSLLYEYFTVYNELTKVKYVTEGMRKPAFLSGEQKKAIVD
LLFKTNRKVTVKQLKEDYFKKIECFDSVEISGVEDRFNASLGTYHDLLKI
IKDKDFLDNEENEDILEDIVLTLTLFEDREMIEERLKTYAHLFDDKVMKQ
LKRRRYTGWGRLSRKLINGIRDKQSGKTILDFLKSDGFANRNFMQLIHDD
SLTFKEDIQKAQVSGQGDSLHEHIANLAGSPAIKKGILQTVKVVDELVKV
MGRHKPENIVIEMARENQTTQKGQKNSRERMKRIEEGIKELGSQILKEHP
VENTQLQNEKLYLYYLQNGRDMYVDQELDINRLSDYDVDHIVPQSFLKDD
SIDNKVLTRSDKNRGKSDNVPSEEVVKKMKNYWRQLLNAKLITQRKFDNL
TKAERGGLSELDKAGFIKRQLVETRQITKHVAQILDSRMNTKYDENDKLI
REVKVITLKSKLVSDFRKDFQFYKVREINNYHHAHDAYLNAVVGTALSHE
YWMRHALTLAKRARDEREVPVGAVLVLNNRVIGEGWNRAIGLHDPTAHAE
IMALRQGGLVMQNYRLIDATLYVTFEPCVMCAGAMIHSRIGRVVFGVRNA
KTGAAGSLMDVLHYPGMNHRVEITEGILADECAALLCYFFRMPRQVFNAQ
KKAQSSTDGSSGSETPGTSESATPESSGIKKYPKLESEFVYGDYKVYDVR
KMIAKSEQEIGKATAKYFFYSNIMNFFKTEITLANGEIRKRPLIETNGET
GEIVWDKGRDFATVRKVLSMPQVNIVKKTEVOTGGFSKESILPKRNSDKL
IARKKDWDPKKYGGFDSPTVAYSVLVVAKVEKGKSKKLKSVKELLGITIM
ERSSFEKNPIDFLEAKGYKEVKKDLIIKLPKYSLFELENGRKRMLASAGE
LQKGNELALPSKYVNFLYLASHYEKLKGSPEDNEQKQLFVEQHKHYLDEI
IEQISEFSKRVILADANLDKVLSAYNKHRDKPIREQAENIIHLFTLTNLG
APAAFKYFDTTIDRKRYTSTKEVLDATLIHQSITGLYETRIDLSQLGGD
111.2 Cas9 TadAins 997
MDKKYSIGLAIGTNSVGWAVITDEYKVPSKKFKVLGNTDRHSIKKNLIGA
LLFDSGETAEATRLKRTARRRYTRRKNRICYLQEIFSNEMAKVDDSFFHR
LEESFLVEEDKKHERHPIFGNIVDEVAYHEKYPTIYHLRKKLVDSTDKAD
LRLIYLALAHMIKFRGHFLIEGDLNPDNSDVDKLFIQLVQTYNQLFEENP
INASGVDAKAILSARLSKSRRLENLIAQLPGEKKNGLFGNLIALSLGLTP
NFKSNFDLAEDAKLQLSKDTYDDDLDNLLAQIGDQYADLFLAAKNLSDAI
LLSDILRVNTEITKAPLSASMIKRYDEHHQDLTLLKALVRQQLPEKYKEI
FFDQSKNGYAGYIDGGASQEEFYKFIKPILEKMDGTEELLVKLNREDLLR
KQRTFDNGSIPHQIHLGELHAILRRQEDFYPFLKDNREKIEKILTFRIPY
YVGPLARGNSRFAWMTRKSEETITPWNFEEVVDKGASAQSFIERMTNFDK
NLPNEKVLPKHSLLYEYFTVYNELTKVKYVTEGMRKPAFLSGEQKKAIVD
LLFKTNRKVTVKQLKEDYFKKIECFDSVEISGVEDRFNASLGTYHDLLKI
IKDKDFLDNEENEDILEDIVLTLTLFEDREMIEERLKTYAHLFDDKVMKQ
LKRRRYTGWGRLSRKLINGIRDKQSGKTILDFLKSDGFANRNEMQLIHDD
SLTFKEDIQKAQVSGQGDSLHEHIANLAGSPAIKKGILQTVKVVDELVKV
MGRHKPENIVIEMARENQTTQKGQKNSRERMKRIEEGIKELGSQILKEHP
VENTQLQNEKLYLYYLQNGRDMYVDQELDINRLSDYDVDHIVPQSFLKDD
SIDNKVLTRSDKNRGKSDNVPSEEVVKKMKNYWRQLLNAKLITQRKFDNL
TKAERGGLSELDKAGFIKRQLVETRQITKHVAQILDSRMNTKYDENDKLI
REVKVITLKSKLVSDFRKDFQFYKVREINNYHHAHDAYLNAVVGTALSHE
YWMRHALTLAKRARDEREVPVGAVLVLNNRVIGEGWNRAIGLHDPTAHAE
IMALRQGGLVMQNYRLIDATLYVTFEPCVMCAGAMIHSRIGRVVFGVRNA
KTGAAGSLMDVLHYPGMNHRVEITEGILADECAALLCYFFRMPRQVFNAQ
KKAQSSTDGSSGSSGSETPGTSESATPESSGGSSIKKYPKLESEFVYGDY
KVYDVRKMIAKSEQEIGKATAKYFFYSNIMNFFKTEITLANGEIRKRPLI
ETNGETGEIVWDKGRDFATVRKVLSMPQVNIVKKTEVOTGGFSKESILPK
RNSDKLIARKKDWDPKKYGGFDSPTVAYSVLVVAKVEKGKSKKLKSVKEL
LGITIMERSSFEKNPIDFLEAKGYKEVKKDLIIKLPKYSLFELENGRKRM
LASAGELQKGNELALPSKYVNFLYLASHYEKLKGSPEDNEQKQLFVEQHK
HYLDEIIEQISEFSKRVILADANLDKVLSAYNKHRDKPIREQAENIIHLF
TLTNLGAPAAFKYFDTTIDRKRYTSTKEVLDATLIHQSITGLYETRIDLS
QLGGD
112 delta HNH Tad A
MDKKYSIGLAIGTNSVGWAVITDEYKVPSKKFKVLGNTDRHSIKKNLIGA
LLFDSGETAEATRLKRTARRRYTRRKNRICYLQEIFSNEMAKVDDSFFHR
LEESFLVEEDKKHERHPIFGNIVDEVAYHEKYPTIYHLRKKLVDSTDKAD
LRLIYLALAHMIKFRGHFLIEGDLNPDNSDVDKLFIQLVQTYNQLFEENP
INASGVDAKAILSARLSKSRRLENLIAQLPGEKKNGLFGNLIALSLGLTP
NFKSNFDLAEDAKLQLSKDTYDDDLDNLLAQIGDQYADLFLAAKNLSDAI
LLSDILRVNTEITKAPLSASMIKRYDEHHQDLTLLKALVRQQLPEKYKEI
FFDQSKNGYAGYIDGGASQEEFYKFIKPILEKMDGTEELLVKLNREDLLR
KQRTFDNGSIPHQIHLGELHAILRRQEDFYPFLKDNREKIEKILTFRIPY
YVGPLARGNSRFAWMTRKSEETITPWNFEEVVDKGASAQSFIERMTNFDK
NLPNEKVLPKHSLLYEYFTVYNELTKVKYVTEGMRKPAFLSGEQKKAIVD
LLFKTNRKVTVKQLKEDYFKKIECFDSVEISGVEDRFNASLGTYHDLLKI
IKDKDFLDNEENEDILEDIVLTLTLFEDREMIEERLKTYAHLFDDKVMKQ
LKRRRYTGWGRLSRKLINGIRDKQSGKTILDFLKSDGFANRNEMQLIHDD
SLTFKEDIQKAQVSGQGDSLHEHIANLAGSPAIKKGILQTVKVVDELVKV
MGRHKPENIVIEMARENQTTQKGQKNSRERMKRIEEGIKELGSEVEFSHE
YWMRHALTLAKRARDEREVPVGAVLVLNNRVIGEGWNRAIGLHDPTAHAE
IMALRQGGLVMQNYRLIDATLYVTFEPCVMCAGAMIHSRIGRVVFGVRNA
KTGAAGSLMDVLHYPGMNHRVEITEGILADECAALLCYFFRMPRQVFNAQ
KKAQSSTDGGLSELDKAGFIKRQLVETRQITKHVAQILDSRMNTKYDEND
KLIREVKVITLKSKLVSDFRKDFQFYKVREINNYHHAHDAYLNAVVGTAL
IKKYPKLESEFVYGDYKVYDVRKMIAKSEQEIGKATAKYFFYSNIMNFFK
TEITLANGEIRKRPLIETNGETGEIVWDKGRDFATVRKVLSMPQVNIVKK
TEVOTGGFSKESILPKRNSDKLIARKKDWDPKKYGGFDSPTVAYSVLVVA
KVEKGKSKKLKSVKELLGITIMERSSFEKNPIDFLEAKGYKEVKKDLIIK
LPKYSLFELENGRKRMLASAGELQKGNELALPSKYVNFLYLASHYEKLKG
SPEDNEQKQLFVEQHKHYLDEIIEQISEFSKRVILADANLDKVLSAYNKH
RDKPIREQAENIIHLFTLTNLGAPAAFKYFDTTIDRKRYTSTKEVLDATL
IHQSITGLYETRIDLSQLGGD
113 N-term single TadA helix trunc 165-end
MSEVEFSHEYWMRHALTLAKRARDEREVPVGAVLVLNNRVIGEGWNRAIG
LHDPTAHAEIMALRQGGLVMQNYRLIDATLYVTFEPCVMCAGAMIHSRIG
RVVFGVRNAKTGAAGSLMDVLHYPGMNHRVEITEGILADECAALLCYFFR
MPRSGGSSGGSSGSETPGTSESATPESSGGSSGGSDKKYSIGLAIGTNSV
GWAVITDEYKVPSKKFKVLGNTDRHSIKKNLIGALLFDSGETAEATRLKR
TARRRYTRRKNRICYLQEIFSNEMAKVDDSFFHRLEESFLVEEDKKHERH
PIFGNIVDEVAYHEKYPTIYHLRKKLVDSTDKADLRLIYLALAHMIKFRG
HFLIEGDLNPDNSDVDKLFIQLVQTYNQLFEENPINASGVDAKAILSARL
SKSRRLENLIAQLPGEKKNGLFGNLIALSLGLTPNFKSNFDLAEDAKLQL
SKDTYDDDLDNLLAQIGDQYADLFLAAKNLSDAILLSDILRVNTEITKAP
LSASMIKRYDEHHQDLTLLKALVRQQLPEKYKEIFFDQSKNGYAGYIDGG
ASQEEFYKFIKPILEKMDGTEELLVKLNREDLLRKQRTFDNGSIPHQIHL
GELHAILRRQEDFYPFLKDNREKIEKILTFRIPYYVGPLARGNSRFAWMT
RKSEETITPWNFEEVVDKGASAQSFIERMTNFDKNLPNEKVLPKHSLLYE
YFTVYNELTKVKYVTEGMRKPAFLSGEQKKAIVDLLFKTNRKVTVKQLKE
DYFKKIECFDSVEISGVEDRFNASLGTYHDLLKIIKDKDFLDNEENEDIL
EDIVLTLTLFEDREMIEERLKTYAHLEDDKVMKQLKRRRYTGWGRLSRKL
INGIRDKQSGKTILDFLKSDGFANRNFMQLIHDDSLTFKEDIQKAQVSGQ
GDSLHEHIANLAGSPAIKKGILQTVKVVDELVKVMGRHKPENIVIEMARE
NQTTQKGQKNSRERMKRIEEGIKELGSQILKEHPVENTQLQNEKLYLYYL
QNGRDMYVDQELDINRLSDYDVDHIVPQSFLKDDSIDNKVLTRSDKNRGK
SDNVPSEEVVKKMKNYWRQLLNAKLITQRKFDNLTKAERGGLSELDKAGF
IKRQLVETRQITKHVAQILDSRMNTKYDENDKLIREVKVITLKSKLVSDF
RKDFQFYKVREINNYHHAHDAYLNAVVGTALIKKYPKLESEFVYGDYKVY
DVRKMIAKSEQEIGKATAKYFFYSNIMNFFKTEITLANGEIRKRPLIETN
GETGEIVWDKGRDFATVRKVLSMPQVNIVKKTEVQTGGFSKESILPKRNS
DKLIARKKDWDPKKYGGFDSPTVAYSVLVVAKVEKGKSKKLKSVKELLGI
TIMERSSFEKNPIDFLEAKGYKEVKKDL11KLPKYSLFELENGRKRMLAS
AGELQKGNELALPSKYVNFLYLASHYEKLKGSPEDNEQKQLFVEQHKHYL
DEIIEQISEFSKRVILADANLDKVLSAYNKHRDKPIREQAENIIHLFTLT
NLGAPAAFKYFDTTIDRKRYTSTKEVLDATLIHQSITGLYETRIDLSQLG
GD
114 N-term single TadA helix trunc 165-end delta
59-65
MSEVEFSHEYWMRHALTLAKRARDEREVPVGAVLVLNNRVIGEGWNRTAH
AEIMALRQGGLVMQNYRLIDATLYVTFEPCVMCAGAMIHSRIGRVVFGVR
NAKTGAAGSLMDVLHYPGMNHRVEITEGILADECAALLCYFFRMPRSGGS
SGGSSGSETPGTSESATPESSGGSSGGSDKKYSIGLAIGTNSVGWAVITD
EYKVPSKKFKVLGNTDRHSIKKNLIGALLFDSGETAEATRLKRTARRRYT
RRKNRICYLQEIFSNEMAKVDDSFFHRLEESFLVEEDKKHERHPIFGNIV
DEVAYHEKYPTIYHLRKKLVDSTDKADLRLIYLALAHMIKFRGHFLIEGD
LNPDNSDVDKLFIQLVQTYNQLFEENPINASGVDAKAILSARLSKSRRLE
NLIAQLPGEKKNGLFGNLIALSLGLTPNFKSNFDLAEDAKLQLSKDTYDD
DLDNLLAQIGDQYADLFLAAKNLSDAILLSDILRVNTEITKAPLSASMIK
RYDEHHQDLTLLKALVRQQLPEKYKEIFFDQSKNGYAGYIDGGASQEEFY
KFIKPILEKMDGTEELLVKLNREDLLRKQRTFDNGSIPHQIHLGELHAIL
RRQEDFYPFLKDNREKIEKILTFRIPYYVGPLARGNSRFAWMTRKSEETI
TPWNFEEVVDKGASAQSFIERMTNFDKNLPNEKVLPKHSLLYEYFTVYNE
LTKVKYVTEGMRKPAFLSGEQKKAIVDLLFKTNRKVTVKQLKEDYFKKIE
CFDSVEISGVEDRFNASLGTYHDLLKIIKDKDFLDNEENEDILEDIVLTL
TLFEDREMIEERLKTYAHLFDDKVMKQLKRRRYTGWGRLSRKLINGIRDK
QSGKTILDFLKSDGFANRNFMQLIHDDSLTFKEDIQKAQVSGQGDSLHEH
IANLAGSPAIKKGILQTVKVVDELVKVMGRHKPENIVIEMARENQTTOKG
QKNSRERMKRIEEGIKELGSQILKEHPVENTQLQNEKLYLYYLQNGRDMY
VDQELDINRLSDYDVDHIVPQSFLKDDSIDNKVLTRSDKNRGKSDNVPSE
EVVKKMKNYWRQLLNAKLITQRKFDNLTKAERGGLSELDKAGFIKRQLVE
TRQITKHVAQILDSRMNTKYDENDKLIREVKVITLKSKLVSDFRKDFQFY
KVREINNYHHAHDAYLNAVVGTALIKKYPKLESEFVYGDYKVYDVRKMIA
KSEQEIGKATAKYFFYSNIMNFFKTEITLANGEIRKRPLIETNGETGEIV
WDKGRDFATVRKVLSMPQVNIVKKTEVQTGGFSKESILPKRNSDKLIARK
KDWDPKKYGGFDSPTVAYSVLVVAKVEKGKSKKLKSVKELLGITIMERSS
FEKNPIDFLEAKGYKEVKKDLIIKLPKYSLFELENGRKRMLASAGELQKG
NELALPSKYVNFLYLASHYEKLKGSPEDNEQKQLFVEQHKHYLDEIIEQI
SEFSKRVILADANLDKVLSAYNKHRDKPIREQAENIIHLFTLTNLGAPAA
FKYFDTTIDRKRYTSTKEVLDATLIHQSITGLYETRIDLSQLGGD
115.1 Cas9 TadAins 1004
MDKKYSIGLAIGTNSVGWAVITDEYKVPSKKFKVLGNTDRHSIKKNLIGA
LLFDSGETAEATRLKRTARRRYTRRKNRICYLQEIFSNEMAKVDDSFFHR
LEESFLVEEDKKHERHPIFGNIVDEVAYHEKYPTIYHLRKKLVDSTDKAD
LRLIYLALAHMIKFRGHFLIEGDLNPDNSDVDKLFIQLVQTYNQLFEENP
INASGVDAKAILSARLSKSRRLENLIAQLPGEKKNGLFGNLIALSLGLTP
NFKSNFDLAEDAKLQLSKDTYDDDLDNLLAQIGDQYADLFLAAKNLSDAI
LLSDILRVNTEITKAPLSASMIKRYDEHHQDLTLLKALVRQQLPEKYKEI
FFDQSKNGYAGYIDGGASQEEFYKFIKPILEKMDGTEELLVKLNREDLLR
KQRTFDNGSIPHQIHLGELHAILRRQEDFYPFLKDNREKIEKILTFRIPY
YVGPLARGNSRFAWMTRKSEETITPWNFEEVVDKGASAQSFIERMTNFDK
NLPNEKVLPKHSLLYEYFTVYNELTKVKYVTEGMRKPAFLSGEQKKAIVD
LLFKTNRKVTVKQLKEDYFKKIECFDSVEISGVEDRFNASLGTYHDLLKI
IKDKDFLDNEENEDILEDIVLTLTLFEDREMIEERLKTYAHLFDDKVMKQ
LKRRRYTGWGRLSRKLINGIRDKQSGKTILDFLKSDGFANRNFMQLIHDD
SLTFKEDIQKAQVSGQGDSLHEHIANLAGSPAIKKGILQTVKVVDELVKV
MGRHKPENIVIEMARENQTTQKGQKNSRERMKRIEEGIKELGSQILKEHP
VENTQLQNEKLYLYYLQNGRDMYVDQELDINRLSDYDVDHIVPQSFLKDD
SIDNKVLTRSDKNRGKSDNVPSEEVVKKMKNYWRQLLNAKLITQRKEDNL
TKAERGGLSELDKAGFIKRQLVETRQITKHVAQILDSRMNTKYDENDKLI
REVKVITLKSKLVSDFRKDFQFYKVREINNYHHAHDAYLNAVVGTALIKK
YPKGSSGSETPGTSESATPESSGSEVEFSHEYWMRHALTLAKRARDEREV
PVGAVLVLNNRVIGEGWNRAIGLHDPTAHAEIMALRQGGLVMQNYRLIDA
TLYVTFEPCVMCAGAMIHSRIGRVVFGVRNAKTGAAGSLMDVLHYPGMNH
RVEITEGILADECAALLCYFFRMPRQLESEFVYGDYKVYDVRKMIAKSEQ
EIGKATAKYFFYSNIMNFFKTEITLANGEIRKRPLIETNGETGEIVWDKG
RDFATVRKVLSMPQVNIVKKTEVQTGGFSKESILPKRNSDKLIARKKDWD
PKKYGGFDSPTVAYSVLVVAKVEKGKSKKLKSVKELLGITIMERSSFEKN
PIDFLEAKGYKEVKKDLIIKLPKYSLFELENGRKRMLASAGELQKGNELA
LPSKYVNFLYLASHYEKLKGSPEDNEQKQLFVEQHKHYLDEIIEQISEFS
KRVILADANLDKVLSAYNKHRDKPIREQAENIIHLFTLTNLGAPAAFKYF
DTTIDRKRYTSTKEVLDATLIHQSITGLYETRIDLSQLGGD
115.2 Cas9 TadAins 1005
MDKKYSIGLAIGTNSVGWAVITDEYKVPSKKFKVLGNTDRHSIKKNLIGA
LLFDSGETAEATRLKRTARRRYTRRKNRICYLQEIFSNEMAKVDDSFFHR
LEESFLVEEDKKHERHPIFGNIVDEVAYHEKYPTIYHLRKKLVDSTDKAD
LRLIYLALAHMIKFRGHFLIEGDLNPDNSDVDKLFIQLVQTYNQLFEENP
INASGVDAKAILSARLSKSRRLENLIAQLPGEKKNGLFGNLIALSLGLTP
NFKSNFDLAEDAKLQLSKDTYDDDLDNLLAQIGDQYADLFLAAKNLSDAI
LLSDILRVNTEITKAPLSASMIKRYDEHHQDLTLLKALVRQQLPEKYKEI
FFDQSKNGYAGYIDGGASQEEFYKFIKPILEKMDGTEELLVKLNREDLLR
KQRTFDNGSIPHQIHLGELHAILRRQEDFYPFLKDNREKIEKILTFRIPY
YVGPLARGNSRFAWMTRKSEETITPWNFEEVVDKGASAQSFIERMTNFDK
NLPNEKVLPKHSLLYEYFTVYNELTKVKYVTEGMRKPAFLSGEQKKAIVD
LLFKTNRKVTVKQLKEDYFKKIECFDSVEISGVEDRFNASLGTYHDLLKI
IKDKDFLDNEENEDILEDIVLTLTLFEDREMIEERLKTYAHLFDDKVMKQ
LKRRRYTGWGRLSRKLINGIRDKQSGKTILDFLKSDGFANRNFMQLIHDD
SLTFKEDIQKAQVSGQGDSLHEHIANLAGSPAIKKGILQTVKVVDELVKV
MGRHKPENIVIEMARENQTTQKGQKNSRERMKRIEEGIKELGSQILKEHP
VENTQLQNEKLYLYYLQNGRDMYVDQELDINRLSDYDVDHIVPQSFLKDD
SIDNKVLTRSDKNRGKSDNVPSEEVVKKMKNYWRQLLNAKLITORKFDNL
TKAERGGLSELDKAGFIKRQLVETRQITKHVAQILDSRMNTKYDENDKLI
REVKVITLKSKLVSDFRKDFQFYKVREINNYHHAHDAYLNAVVGTALIKK
YPKLGSSGSETPGTSESATPESSGSEVEFSHEYWMRHALTLAKRARDERE
VPVGAVLVLNNRVIGEGWNRAIGLHDPTAHAEIMALRQGGLVMQNYRLID
ATLYVTFEPCVMCAGAMIHSRIGRVVFGVRNAKTGAAGSLMDVLHYPGMN
HRVEITEGILADECAALLCYFFRMPRQESEFVYGDYKVYDVRKMIAKSEQ
EIGKATAKYFFYSNIMNFFKTEITLANGEIRKRPLIETNGETGEIVWDKG
RDFATVRKVLSMPQVNIVKKTEVQTGGFSKESILPKRNSDKLIARKKDWD
PKKYGGFDSPTVAYSVLVVAKVEKGKSKKLKSVKELLGITIMERSSFEKN
PIDFLEAKGYKEVKKDLIIKLPKYSLFELENGRKRMLASAGELQKGNELA
LPSKYVNFLYLASHYEKLKGSPEDNEQKQLFVEQHKHYLDEIIEQISEFS
KRVILADANLDKVLSAYNKHRDKPIREQAENIIHLFTLTNLGAPAAFKYF
DTTIDRKRYTSTKEVLDATLIHQSITGLYETRIDLSQLGGD
115.3 Cas9 TadAins 1006
MDKKYSIGLAIGTNSVGWAVITDEYKVPSKKFKVLGNTDRHSIKKNLIGA
LLFDSGETAEATRLKRTARRRYTRRKNRICYLQEIFSNEMAKVDDSFFHR
LEESFLVEEDKKHERHPIFGNIVDEVAYHEKYPTIYHLRKKLVDSTDKAD
LRLIYLALAHMIKFRGHFLIEGDLNPDNSDVDKLFIQLVQTYNQLFEENP
INASGVDAKAILSARLSKSRRLENLIAQLPGEKKNGLFGNLIALSLGLTP
NFKSNFDLAEDAKLQLSKDTYDDDLDNLLAQIGDQYADLFLAAKNLSDAI
LLSDILRVNTEITKAPLSASMIKRYDEHHQDLTLLKALVRQQLPEKYKEI
FFDQSKNGYAGYIDGGASQEEFYKFIKPILEKMDGTEELLVKLNREDLLR
KQRTFDNGSIPHQIHLGELHAILRRQEDFYPFLKDNREKIEKILTFRIPY
YVGPLARGNSRFAWMTRKSEETITPWNFEEVVDKGASAQSFIERMTNFDK
NLPNEKVLPKHSLLYEYFTVYNELTKVKYVTEGMRKPAFLSGEQKKAIVD
LLFKTNRKVTVKQLKEDYFKKIECFDSVEISGVEDRFNASLGTYHDLLKI
IKDKDFLDNEENEDILEDIVLTLTLFEDREMIEERLKTYAHLFDDKVMKQ
LKRRRYTGWGRLSRKLINGIRDKQSGKTILDFLKSDGFANRNFMQLIHDD
SLTFKEDIQKAQVSGQGDSLHEHIANLAGSPAIKKGILQTVKVVDELVKV
MGRHKPENIVIEMARENQTTQKGQKNSRERMKRIEEGIKELGSQILKEHP
VENTQLQNEKLYLYYLQNGRDMYVDQELDINRLSDYDVDHIVPQSFLKDD
SIDNKVLTRSDKNRGKSDNVPSEEVVKKMKNYWRQLLNAKLITQRKFDNL
TKAERGGLSELDKAGFIKRQLVETRQITKHVAQILDSRMNTKYDENDKLI
REVKVITLKSKLVSDFRKDFQEYKVREINNYHHAHDAYLNAVVGTALIKK
YPKLEGSSGSETPGTSESATPESSGSEVEFSHEYWMRHALTLAKRARDER
EVPVGAVLVLNNRVIGEGWNRAIGLHDPTAHAEIMALRQGGLVMQNYRLI
DATLYVTFEPCVMCAGAMIHSRIGRVVFGVRNAKTGAAGSLMDVLHYPGM
NHRVEITEGILADECAALLCYFFRMPRQSEFVYGDYKVYDVRKMIAKSEQ
EIGKATAKYFFYSNIMNFFKTEITLANGEIRKRPLIETNGETGEIVWDKG
RDFATVRKVLSMPQVNIVKKTEVQTGGFSKESILPKRNSDKLIARKKDWD
PKKYGGFDSPTVAYSVLVVAKVEKGKSKKLKSVKELLGITIMERSSFEKN
PIDFLEAKGYKEVKKDLIIKLPKYSLFELENGRKRMLASAGELQKGNELA
LPSKYVNFLYLASHYEKLKGSPEDNEQKQLFVEQHKHYLDEIIEQISEFS
KRVILADANLDKVLSAYNKHRDKPIREQAENIIHLFTLTNLGAPAAFKYF
DTTIDRKRYTSTKEVLDATLIHQSITGLYETRIDLSQLGGD
115.4 Cas9 TadAins 1007
MDKKYSIGLAIGTNSVGWAVITDEYKVPSKKFKVLGNTDRHSIKKNLIGA
LLFDSGETAEATRLKRTARRRYTRRKNRICYLQEIFSNEMAKVDDSFFHR
LEESFLVEEDKKHERHPIFGNIVDEVAYHEKYPTIYHLRKKLVDSTDKAD
LRLIYLALAHMIKFRGHFLIEGDLNPDNSDVDKLFIQLVQTYNQLFEENP
INASGVDAKAILSARLSKSRRLENLIAQLPGEKKNGLFGNLIALSLGLTP
NFKSNFDLAEDAKLQLSKDTYDDDLDNLLAQIGDQYADLFLAAKNLSDAI
LLSDILRVNTEITKAPLSASMIKRYDEHHQDLTLLKALVRQQLPEKYKEI
FFDQSKNGYAGYIDGGASQEEFYKFIKPILEKMDGTEELLVKLNREDLLR
KQRTFDNGSIPHQIHLGELHAILRRQEDFYPFLKDNREKIEKILTFRIPY
YVGPLARGNSRFAWMTRKSEETITPWNFEEVVDKGASAQSFIERMTNFDK
NLPNEKVLPKHSLLYEYFTVYNELTKVKYVTEGMRKPAFLSGEQKKAIVD
LLFKTNRKVTVKQLKEDYFKKIECFDSVEISGVEDRFNASLGTYHDLLKI
IKDKDFLDNEENEDILEDIVLTLTLFEDREMIEERLKTYAHLFDDKVMKQ
LKRRRYTGWGRLSRKLINGIRDKQSGKTILDFLKSDGFANRNFMQLIHDD
SLTFKEDIQKAQVSGQGDSLHEHIANLAGSPAIKKGILQTVKVVDELVKV
MGRHKPENIVIEMARENQTTQKGQKNSRERMKRIEEGIKELGSQILKEHP
VENTQLQNEKLYLYYLQNGRDMYVDQELDINRLSDYDVDHIVPQSFLKDD
SIDNKVLTRSDKNRGKSDNVPSEEVVKKMKNYWRQLLNAKLITQRKFDNL
TKAERGGLSELDKAGFIKRQLVETRQITKHVAQILDSRMNTKYDENDKLI
REVKVITLKSKLVSDFRKDFQFYKVREINNYHHAHDAYLNAVVGTALIKK
YPKLESGSSGSETPGTSESATPESSGSEVEESHEYWMRHALTLAKRARDE
REVPVGAVLVLNNRVIGEGWNRAIGLHDPTAHAEIMALRQGGLVMQNYRL
IDATLYVTFEPCVMCAGAMIHSRIGRVVFGVRNAKTGAAGSLMDVLHYPG
MNHRVEITEGILADECAALLCYFFRMPRQEFVYGDYKVYDVRKMIAKSEQ
EIGKATAKYFFYSNIMNFFKTEITLANGEIRKRPLIETNGETGEIVWDKG
RDFATVRKVLSMPQVNIVKKTEVQTGGFSKESILPKRNSDKLIARKKDWD
PKKYGGFDSPTVAYSVLVVAKVEKGKSKKLKSVKELLGITIMERSSFEKN
PIDFLEAKGYKEVKKDLIIKLPKYSLFELENGRKRMLASAGELQKGNELA
LPSKYVNFLYLASHYEKLKGSPEDNEQKQLFVEQHKHYLDEIIEQISEFS
KRVILADANLDKVLSAYNKHRDKPIREQAENIIHLFTLTNLGAPAAFKYF
DTTIDRKRYTSTKEVLDATLIHQSITGLYETRIDLSQLGGD
116.1 Cas9 TadAins C-term truncate2 792
MDKKYSIGLAIGTNSVGWAVITDEYKVPSKKFKVLGNTDRHSIKKNLIGA
LLFDSGETAEATRLKRTARRRYTRRKNRICYLQEIFSNEMAKVDDSFFHR
LEESFLVEEDKKHERHPIFGNIVDEVAYHEKYPTIYHLRKKLVDSTDKAD
LRLIYLALAHMIKFRGHFLIEGDLNPDNSDVDKLFIQLVQTYNQLFEENP
INASGVDAKAILSARLSKSRRLENLIAQLPGEKKNGLFGNLIALSLGLTP
NFKSNFDLAEDAKLQLSKDTYDDDLDNLLAQIGDQYADLFLAAKNLSDAI
LLSDILRVNTEITKAPLSASMIKRYDEHHQDLTLLKALVRQQLPEKYKEI
FFDQSKNGYAGYIDGGASQEEFYKFIKPILEKMDGTEELLVKLNREDLLR
KQRTFDNGSIPHQIHLGELHAILRRQEDFYPFLKDNREKIEKILTFRIPY
YVGPLARGNSRFAWMTRKSEETITPWNFEEVVDKGASAQSFIERMTNFDK
NLPNEKVLPKHSLLYEYFTVYNELTKVKYVTEGMRKPAFLSGEQKKAIVD
LLFKTNRKVTVKQLKEDYFKKIECFDSVEISGVEDRFNASLGTYHDLLKI
IKDKDFLDNEENEDILEDIVLTLTLFEDREMIEERLKTYAHLFDDKVMKQ
LKRRRYTGWGRLSRKLINGIRDKQSGKTILDFLKSDGFANRNFMQLIHDD
SLTFKEDIQKAQVSGQGDSLHEHIANLAGSPAIKKGILQTVKVVDELVKV
MGRHKPENIVIEMARENQTTQKGQKNSRERMKRIEEGIKELGGSSGSETP
GTSESATPESSGSEVEFSHEYWMRHALTLAKRARDEREVPVGAVLVLNNR
VIGEGWNRAIGLHDPTAHAEIMALRQGGLVMQNYRLIDATLYVTFEPCVM
CAGAMIHSRIGRVVFGVRNAKTGAAGSLMDVLHYPGMNHRVEITEGILAD
ECAALLCYFFRMPRQSQILKEHPVENTQLQNEKLYLYYLQNGRDMYVDQE
LDINRLSDYDVDHIVPOSFLKDDSIDNKVLTRSDKNRGKSDNVPSEEVVK
KMKNYWRQLLNAKLITQRKFDNLTKAERGGLSELDKAGEIKRQLVETRQI
TKHVAQILDSRMNTKYDENDKLIREVKVITLKSKLVSDFRKDFQFYKVRE
INNYHHAHDAYLNAVVGTALIKKYPKLESEFVYGDYKVYDVRKMIAKSEQ
EIGKATAKYFFYSNIMNFFKTEITLANGEIRKRPLIETNGETGEIVWDKG
RDFATVRKVLSMPQVNIVKKTEVQTGGFSKESILPKRNSDKLIARKKDWD
PKKYGGFDSPTVAYSVLVVAKVEKGKSKKLKSVKELLGITIMERSSFEKN
PIDFLEAKGYKEVKKDLIIKLPKYSLFELENGRKRMLASAGELQKGNELA
LPSKYVNFLYLASHYEKLKGSPEDNEQKQLFVEQHKHYLDEIIEQISEFS
KRVILADANLDKVLSAYNKHRDKPIREQAENIIHLFTLTNLGAPAAFKYF
DTTIDRKRYTSTKEVLDATLIHQSITGLYETRIDLSQLGGD
116.2 Cas9 TadAins C-term truncate2 791
MDKKYSIGLAIGTNSVGWAVITDEYKVPSKKFKVLGNTDRHSIKKNLIGA
LLFDSGETAEATRLKRTARRRYTRRKNRICYLQEIFSNEMAKVDDSFFHR
LEESFLVEEDKKHERHPIFGNIVDEVAYHEKYPTIYHLRKKLVDSTDKAD
LRLIYLALAHMIKFRGHFLIEGDLNPDNSDVDKLFIQLVQTYNQLFEENP
INASGVDAKAILSARLSKSRRLENLIAQLPGEKKNGLFGNLIALSLGLTP
NFKSNFDLAEDAKLQLSKDTYDDDLDNLLAQIGDQYADLFLAAKNLSDAI
LLSDILRVNTEITKAPLSASMIKRYDEHHQDLTLLKALVRQQLPEKYKEI
FFDQSKNGYAGYIDGGASQEEFYKFIKPILEKMDGTEELLVKLNREDLLR
KQRTFDNGSIPHQIHLGELHAILRRQEDFYPFLKDNREKIEKILTFRIPY
YVGPLARGNSRFAWMTRKSEETITPWNFEEVVDKGASAQSFIERMTNFDK
NLPNEKVLPKHSLLYEYFTVYNELTKVKYVTEGMRKPAFLSGEQKKAIVD
LLFKTNRKVTVKQLKEDYFKKIECFDSVEISGVEDRFNASLGTYHDLLKI
IKDKDFLDNEENEDILEDIVLTLTLFEDREMIEERLKTYAHLFDDKVMKQ
LKRRRYTGWGRLSRKLINGIRDKQSGKTILDFLKSDGFANRNFMQLIHDD
SLTFKEDIQKAQVSGQGDSLHEHIANLAGSPAIKKGILQTVKVVDELVKV
MGRHKPENIVIEMARENQTTQKGQKNSRERMKRIEEGIKELGSSGSETPG
TSESATPESSGSEVEFSHEYWMRHALTLAKRARDEREVPVGAVLVLNNRV
IGEGWNRAIGLHDPTAHAEIMALRQGGLVMQNYRLIDATLYVTFEPCVMC
AGAMIHSRIGRVVFGVRNAKTGAAGSLMDVLHYPGMNHRVEITEGILADE
CAALLCYFFRMPRQGSQILKEHPVENTQLQNEKLYLYYLQNGRDMYVDQE
LDINRLSDYDVDHIVPQSFLKDDSIDNKVLTRSDKNRGKSDNVPSEEVVK
KMKNYWRQLLNAKLITQRKFDNLTKAERGGLSELDKAGFIKRQLVETRQI
TKHVAQILDSRMNTKYDENDKLIREVKVITLKSKLVSDFRKDFQFYKVRE
INNYHHAHDAYLNAVVGTALIKKYPKLESEFVYGDYKVYDVRKMIAKSEQ
EIGKATAKYFFYSNIMNFFKTEITLANGEIRKRPLIETNGETGEIVWDKG
RDFATVRKVLSMPQVNIVKKTEVQTGGFSKESILPKRNSDKLIARKKDWD
PKKYGGFDSPTVAYSVLVVAKVEKGKSKKLKSVKELLGITIMERSSFEKN
PIDFLEAKGYKEVKKDLIIKLPKYSLFELENGRKRMLASAGELQKGNELA
LPSKYVNFLYLASHYEKLKGSPEDNEQKQLFVEQHKHYLDEIIEQISEFS
KRVILADANLDKVLSAYNKHRDKPIREQAENIIHLFTLTNLGAPAAFKYF
DTTIDRKRYTSTKEVLDATLIHQSITGLYETRIDLSQLGGD
116.3 Cas9 TadAins C-term truncate2 790
MDKKYSIGLAIGTNSVGWAVITDEYKVPSKKFKVLGNTDRHSIKKNLIGA
LLFDSGETAEATRLKRTARRRYTRRKNRICYLQEIFSNEMAKVDDSFFHR
LEESFLVEEDKKHERHPIFGNIVDEVAYHEKYPTIYHLRKKLVDSTDKAD
LRLIYLALAHMIKFRGHFLIEGDLNPDNSDVDKLFIQLVQTYNQLFEENP
INASGVDAKAILSARLSKSRRLENLIAQLPGEKKNGLFGNLIALSLGLTP
NFKSNFDLAEDAKLQLSKDTYDDDLDNLLAQIGDQYADLFLAAKNLSDAI
LLSDILRVNTEITKAPLSASMIKRYDEHHQDLTLLKALVRQQLPEKYKEI
FFDQSKNGYAGYIDGGASQEEFYKFIKPILEKMDGTEELLVKLNREDLLR
KQRTFDNGSIPHQIHLGELHAILRRQEDFYPFLKDNREKIEKILTFRIPY
YVGPLARGNSRFAWMTRKSEETITPWNFEEVVDKGASAQSFIERMTNFDK
NLPNEKVLPKHSLLYEYFTVYNELTKVKYVTEGMRKPAFLSGEQKKAIVD
LLFKTNRKVTVKQLKEDYFKKIECFDSVEISGVEDRFNASLGTYHDLLKI
IKDKDFLDNEENEDILEDIVLTLTLFEDREMIEERLKTYAHLFDDKVMKQ
LKRRRYTGWGRLSRKLINGIRDKQSGKTILDFLKSDGFANRNFMQLIHDD
SLTFKEDIQKAQVSGQGDSLHEHIANLAGSPAIKKGILQTVKVVDELVKV
MGRHKPENIVIEMARENQTTQKGQKNSRERMKRIEEGIKEGSSGSETPGT
SESATPESSGSEVEFSHEYWMRHALTLAKRARDEREVPVGAVLVLNNRVI
GEGWNRAIGLHDPTAHAEIMALRQGGLVMQNYRLIDATLYVTFEPCVMCA
GAMIHSRIGRVVFGVRNAKTGAAGSLMDVLHYPGMNHRVEITEGILADEC
AALLCYFFRMPRQLGSQILKEHPVENTQLQNEKLYLYYLQNGRDMYVDQE
LDINRLSDYDVDHIVPQSFLKDDSIDNKVLTRSDKNRGKSDNVPSEEVVK
KMKNYWRQLLNAKLITQRKFDNLTKAERGGLSELDKAGFIKRQLVETRQI
TKHVAQILDSRMNTKYDENDKLIREVKVITLKSKLVSDFRKDFQFYKVRE
INNYHHAHDAYLNAVVGTALIKKYPKLESEFVYGDYKVYDVRKMIAKSEQ
EIGKATAKYFFYSNIMNFFKTEITLANGEIRKRPLIETNGETGEIVWDKG
RDFATVRKVLSMPQVNIVKKTEVQTGGFSKESILPKRNSDKLIARKKDWD
PKKYGGFDSPTVAYSVLVVAKVEKGKSKKLKSVKELLGITIMERSSFEKN
PIDFLEAKGYKEVKKDLIIKLPKYSLFELENGRKRMLASAGELQKGNELA
LPSKYVNFLYLASHYEKLKGSPEDNEQKQLFVEQHKHYLDEIIEQISEFS
KRVILADANLDKVLSAYNKHRDKPIREQAENIIHLFTLTNLGAPAAFKYF
DTTIDRKRYTSTKEVLDATLIHQSITGLYETRIDLSQLGGD
117 Cas9 delta 1017-1069
MDKKYSIGLAIGTNSVGWAVITDEYKVPSKKFKVLGNTDRHSIKKNLIGA
LLFDSGETAEATRLKRTARRRYTRRKNRICYLQEIFSNEMAKVDDSFFHR
LEESFLVEEDKKHERHPIFGNIVDEVAYHEKYPTIYHLRKKLVDSTDKAD
LRLIYLALAHMIKFRGHFLIEGDLNPDNSDVDKLFIQLVQTYNQLFEENP
INASGVDAKAILSARLSKSRRLENLIAQLPGEKKNGLFGNLIALSLGLTP
NFKSNFDLAEDAKLQLSKDTYDDDLDNLLAQIGDQYADLFLAAKNLSDAI
LLSDILRVNTEITKAPLSASMIKRYDEHHQDLTLLKALVRQQLPEKYKEI
FFDQSKNGYAGYIDGGASQEEFYKFIKPILEKMDGTEELLVKLNREDLLR
KQRTFDNGSIPHQIHLGELHAILRRQEDFYPFLKDNREKIEKILTFRIPY
YVGPLARGNSRFAWMTRKSEETITPWNFEEVVDKGASAQSFIERMTNFDK
NLPNEKVLPKHSLLYEYFTVYNELTKVKYVTEGMRKPAFLSGEQKKAIVD
LLFKTNRKVTVKQLKEDYFKKIECFDSVEISGVEDRFNASLGTYHDLLKI
IKDKDFLDNEENEDILEDIVLTLTLFEDREMIEERLKTYAHLFDDKVMKQ
LKRRRYTGWGRLSRKLINGIRDKQSGKTILDFLKSDGFANRNFMQLIHDD
SLTFKEDIQKAQVSGQGDSLHEHIANLAGSPAIKKGILQTVKVVDELVKV
MGRHKPENIVIEMARENQTTQKGQKNSRERMKRIEEGIKELGSQILKEHP
VENTQLQNEKLYLYYLQNGRDMYVDQELDINRLSDYDVDHIVPQSFLKDD
SIDNKVLTRSDKNRGKSDNVPSEEVVKKMKNYWRQLLNAKLITQRKFDNL
TKAERGGLSELDKAGFIKRQLVETRQITKHVAQILDSRMNTKYDENDKLI
REVKVITLKSKLVSDFRKDFQFYKVREINNYHHAHDAYLNAVVGTALIKK
YPKLESEFVYGDYKVYSSGSEVEFSHEYWMRHALTLAKRARDEREVPVGA
VLVLNNRVIGEGWNRAIGLHDPTAHAEIMALRQGGLVMQNYRLIDATLYV
TFEPCVMCAGAMIHSRIGRVVFGVRNAKTGAAGSLMDVLHYPGMNHRVE1
TEGILADECAALLCYFFRMPRQVFNAQKKAQSSTDGEIVWDKGRDFATVR
KVLSMPQVNIVKKTEVQTGGFSKESILPKRNSDKLIARKKDWDPKKYGGE
DSPTVAYSVLVVAKVEKGKSKKLKSVKELLGITIMERSSFEKNPIDFLEA
KGYKEVKKDLIIKLPKYSLFELENGRKRMLASAGELQKGNELALPSKYVN
FLYLASHYEKLKGSPEDNEQKQLFVEQHKHYLDEIIEQISEFSKRVILAD
ANLDKVLSAYNKHRDKPIREQAENIIHLFTLTNLGAPAAFKYFDTTIDRK
RYTSTKEVLDATLIHQSITGLYETRIDLSQLGGD
118 Cas9 TadA-CP116ins 1067
MDKKYSIGLAIGTNSVGWAVITDEYKVPSKKFKVLGNTDRHSIKKNLIGA
LLFDSGETAEATRLKRTARRRYTRRKNRICYLQEIFSNEMAKVDDSFFHR
LEESFLVEEDKKHERHPIFGNIVDEVAYHEKYPTIYHLRKKLVDSTDKAD
LRLIYLALAHMIKFRGHFLIEGDLNPDNSDVDKLFIQLVQTYNQLFEENP
INASGVDAKAILSARLSKSRRLENLIAQLPGEKKNGLFGNLIALSLGLTP
NFKSNFDLAEDAKLQLSKDTYDDDLDNLLAQIGDQYADLFLAAKNLSDAI
LLSDILRVNTEITKAPLSASMIKRYDEHHQDLTLLKALVRQQLPEKYKEI
FFDQSKNGYAGYIDGGASQEEFYKFIKPILEKMDGTEELLVKLNREDLLR
KQRTFDNGSIPHQIHLGELHAILRRQEDFYPFLKDNREKIEKILTFRIPY
YVGPLARGNSRFAWMTRKSEETITPWNFEEVVDKGASAQSFIERMTNFDK
NLPNEKVLPKHSLLYEYFTVYNELTKVKYVTEGMRKPAFLSGEQKKAIVD
LLFKTNRKVTVKQLKEDYFKKIECFDSVEISGVEDRFNASLGTYHDLLKI
IKDKDFLDNEENEDILEDIVLTLTLFEDREMIEERLKTYAHLFDDKVMKQ
LKRRRYTGWGRLSRKLINGIRDKQSGKTILDFLKSDGFANRNFMQLIHDD
SLTFKEDIQKAQVSGQGDSLHEHIANLAGSPAIKKGILQTVKVVDELVKV
MGRHKPENIVIEMARENQTTQKGQKNSRERMKRIEEGIKELGSQILKEHP
VENTQLQNEKLYLYYLQNGRDMYVDQELDINRLSDYDVDHIVPQSFLKDD
SIDNKVLTRSDKNRGKSDNVPSEEVVKKMKNYWRQLLNAKLITQRKFDNL
TKAERGGLSELDKAGFIKRQLVETRQITKHVAQILDSRMNTKYDENDKLI
REVKVITLKSKLVSDFRKDFQFYKVREINNYHHAHDAYLNAVVGTALIKK
YPKLESEFVYGDYKVYDVRKMIAKSEQEIGKATAKYFFYSNIMNFFKTEI
TLANGEIRKRPLIETNMNHRVEITEGILADECAALLCYFFRMPRQVFNAQ
KKAQSSTDGSSGSETPGTSESATPESSGSEVEFSHEYWMRHALTLAKRAR
DEREVPVGAVLVLNNRVIGEGWNRAIGLHDPTAHAEIMALRQGGLVMQNY
RLIDATLYVTFEPCVMCAGAMIHSRIGRVVFGVRNAKTGAAGSLMDVLHY
PGGETGEIVWDKGRDFATVRKVLSMPQVNIVKKTEVQTGGFSKESILPKR
NSDKLIARKKDWDPKKYGGFDSPTVAYSVLVVAKVEKGKSKKLKSVKELL
GITIMERSSFEKNPIDFLEAKGYKEVKKDLIIKLPKYSLFELENGRKRML
ASAGELQKGNELALPSKYVNFLYLASHYEKLKGSPEDNEQKQLFVEQHKH
YLDEIIEQISEFSKRVILADANLDKVLSAYNKHRDKPIREQAENIIHLFT
LTNLGAPAAFKYFDTTIDRKRYTSTKEVLDATLIHQSITGLYETRIDLSQ
LGGD
119 Cas9 TadAins 701
MDKKYSIGLAIGTNSVGWAVITDEYKVPSKKFKVLGNTDRHSIKKNLIGA
LLFDSGETAEATRLKRTARRRYTRRKNRICYLQEIFSNEMAKVDDSFFHR
LEESFLVEEDKKHERHPIFGNIVDEVAYHEKYPTIYHLRKKLVDSTDKAD
LRLIYLALAHMIKFRGHFLIEGDLNPDNSDVDKLFIQLVQTYNQLFEENP
INASGVDAKAILSARLSKSRRLENLIAQLPGEKKNGLFGNLIALSLGLTP
NFKSNFDLAEDAKLQLSKDTYDDDLDNLLAQIGDQYADLFLAAKNLSDAI
LLSDILRVNTEITKAPLSASMIKRYDEHHQDLTLLKALVRQQLPEKYKEI
FFDQSKNGYAGYIDGGASQEEFYKFIKPILEKMDGTEELLVKLNREDLLR
KQRTFDNGSIPHQIHLGELHAILRRQEDFYPFLKDNREKIEKILTFRIPY
YVGPLARGNSRFAWMTRKSEETITPWNFEEVVDKGASAQSFIERMTNFDK
NLPNEKVLPKHSLLYEYFTVYNELTKVKYVTEGMRKPAFLSGEQKKAIVD
LLFKTNRKVTVKQLKEDYFKKIECFDSVEISGVEDRFNASLGTYHDLLKI
IKDKDFLDNEENEDILEDIVLTLTLFEDREMIEERLKTYAHLFDDKVMKQ
LKRRRYTGWGRLSRKLINGIRDKQSGKTILDFLKSDGFANRNFMQLIHDD
SGSSGSETPGTSESATPESSGSEVEFSHEYWMRHALTLAKRARDEREVPV
GAVLVLNNRVIGEGWNRAIGLHDPTAHAEIMALRQGGLVMQNYRLIDATL
YVTFEPCVMCAGAMIHSRIGRVVFGVRNAKTGAAGSLMDVLHYPGMNHRV
EITEGILADECAALLCYFFRMPRQVFNAQKKAQSSTDLTFKEDIQKAQVS
GQGDSLHEHIANLAGSPAIKKGILQTVKVVDELVKVMGRHKPENIVIEMA
RENQTTQKGQKNSRERMKRIEEGIKELGSQILKEHPVENTQLQNEKLYLY
YLQNGRDMYVDQELDINRLSDYDVDHIVPQSFLKDDSIDNKVLTRSDKNR
GKSDNVPSEEVVKKMKNYWRQLLNAKLITQRKFDNLTKAERGGLSELDKA
GFIKRQLVETRQITKHVAQILDSRMNTKYDENDKLIREVKVITLKSKLVS
DFRKDFQFYKVREINNYHHAHDAYLNAVVGTALIKKYPKLESEFVYGDYK
VYDVRKMIAKSEQEIGKATAKYFFYSNIMNFFKTEITLANGEIRKRPLIE
TNGETGEIVWDKGRDFATVRKVLSMPQVNIVKKTEVQTGGFSKESILPKR
NSDKLIARKKDWDPKKYGGFDSPTVAYSVLVVAKVEKGKSKKLKSVKELL
GITIMERSSFEKNPIDFLEAKGYKEVKKDLIIKLPKYSLFELENGRKRML
ASAGELQKGNELALPSKYVNFLYLASHYEKLKGSPEDNEQKQLFVEQHKH
YLDEIIEQISEFSKRVILADANLDKVLSAYNKHRDKPIREQAENIIHLFT
LTNLGAPAAFKYFDTTIDRKRYTSTKEVLDATLIHQSITGLYETRIDLSQ
LGGD
120 Cas9 TadACP136ins 1248
MDKKYSIGLAIGTNSVGWAVITDEYKVPSKKFKVLGNTDRHSIKKNLIGA
LLFDSGETAEATRLKRTARRRYTRRKNRICYLQEIFSNEMAKVDDSFFHR
LEESFLVEEDKKHERHPIFGNIVDEVAYHEKYPTIYHLRKKLVDSTDKAD
LRLIYLALAHMIKFRGHFLIEGDLNPDNSDVDKLFIQLVQTYNQLFEENP
INASGVDAKAILSARLSKSRRLENLIAQLPGEKKNGLFGNLIALSLGLTP
NFKSNFDLAEDAKLQLSKDTYDDDLDNLLAQIGDQYADLFLAAKNLSDAI
LLSDILRVNTEITKAPLSASMIKRYDEHHQDLTLLKALVRQQLPEKYKEI
FFDQSKNGYAGYIDGGASQEEFYKFIKPILEKMDGTEELLVKLNREDLLR
KQRTFDNGSIPHQIHLGELHAILRRQEDFYPFLKDNREKIEKILTFRIPY
YVGPLARGNSRFAWMTRKSEETITPWNFEEVVDKGASAQSFIERMTNFDK
NLPNEKVLPKHSLLYEYFTVYNELTKVKYVTEGMRKPAFLSGEQKKAIVD
LLFKTNRKVTVKQLKEDYFKKIECFDSVEISGVEDRFNASLGTYHDLLKI
IKDKDFLDNEENEDILEDIVLTLTLFEDREMIEERLKTYAHLFDDKVMKQ
LKRRRYTGWGRLSRKLINGIRDKQSGKTILDFLKSDGFANRNFMQLIHDD
SLTFKEDIQKAQVSGQGDSLHEHIANLAGSPAIKKGILQTVKVVDELVKV
MGRHKPENIVIEMARENQTTQKGQKNSRERMKRIEEGIKELGSQILKEHP
VENTQLQNEKLYLYYLQNGRDMYVDQELDINRLSDYDVDHIVPQSFLKDD
SIDNKVLTRSDKNRGKSDNVPSEEVVKKMKNYWRQLLNAKLITQRKFDNL
TKAERGGLSELDKAGFIKRQLVETRQITKHVAQILDSRMNTKYDENDKLI
REVKVITLKSKLVSDFRKDFQFYKVREINNYHHAHDAYLNAVVGTALIKK
YPKLESEFVYGDYKVYDVRKMIAKSEQEIGKATAKYFFYSNIMNFFKTEI
TLANGEIRKRPLIETNGETGEIVWDKGRDFATVRKVLSMPQVNIVKKTEV
QTGGFSKESILPKRNSDKLIARKKDWDPKKYGGFDSPTVAYSVLVVAKVE
KGKSKKLKSVKELLGITIMERSSFEKNPIDFLEAKGYKEVKKDLIIKLPK
YSLFELENGRKRMLASAGELQKGNELALPSKYVNFLYLASHYEKLKGSMN
HRVEITEGILADECAALLCYFFRMPRQVFNAQKKAQSSTDGSSGSETPGT
SESATPESSGSEVEFSHEYWMRHALTLAKRARDEREVPVGAVLVLNNRVI
GEGWNRAIGLHDPTAHAEIMALRQGGLVMQNYRLIDATLYVTFEPCVMCA
GAMIHSRIGRVVFGVRNAKTGAAGSLMDVLHYPGPEDNEQKQLFVEQHKH
YLDEIIEQISEFSKRVILADANLDKVLSAYNKHRDKPIREQAENIIHLFT
LTNLGAPAAFKYFDTTIDRKRYTSTKEVLDATLIHQSITGLYETRIDLSQ
LGGD
121 Cas9 TadACP136ins 1052
MDKKYSIGLAIGTNSVGWAVITDEYKVPSKKFKVLGNTDRHSIKKNLIGA
LLFDSGETAEATRLKRTARRRYTRRKNRICYLQEIFSNEMAKVDDSFFHR
LEESFLVEEDKKHERHPIFGNIVDEVAYHEKYPTIYHLRKKLVDSTDKAD
LRLIYLALAHMIKFRGHFLIEGDLNPDNSDVDKLFIQLVQTYNQLFEENP
INASGVDAKAILSARLSKSRRLENLIAQLPGEKKNGLFGNLIALSLGLTP
NFKSNFDLAEDAKLQLSKDTYDDDLDNLLAQIGDQYADLFLAAKNLSDAI
LLSDILRVNTEITKAPLSASMIKRYDEHHQDLTLLKALVRQQLPEKYKEI
FFDQSKNGYAGYIDGGASQEEFYKFIKPILEKMDGTEELLVKLNREDLLR
KQRTFDNGSIPHQIHLGELHAILRRQEDFYPFLKDNREKIEKILTFRIPY
YVGPLARGNSRFAWMTRKSEETITPWNFEEVVDKGASAQSFIERMTNFDK
NLPNEKVLPKHSLLYEYFTVYNELTKVKYVTEGMRKPAFLSGEQKKAIVD
LLFKTNRKVTVKQLKEDYFKKIECFDSVEISGVEDRFNASLGTYHDLLKI
IKDKDFLDNEENEDILEDIVLTLTLFEDREMIEERLKTYAHLFDDKVMKQ
LKRRRYTGWGRLSRKLINGIRDKQSGKTILDFLKSDGFANRNFMQLIHDD
SLTFKEDIQKAQVSGQGDSLHEHIANLAGSPAIKKGILQTVKVVDELVKV
MGRHKPENIVIEMARENQTTQKGQKNSRERMKRIEEGIKELGSQILKEHP
VENTQLQNEKLYLYYLQNGRDMYVDQELDINRLSDYDVDHIVPQSFLKDD
SIDNKVLTRSDKNRGKSDNVPSEEVVKKMKNYWRQLLNAKLITQRKFDNL
TKAERGGLSELDKAGFIKRQLVETRQITKHVAQILDSRMNTKYDENDKLI
REVKVITLKSKLVSDFRKDFQFYKVREINNYHHAHDAYLNAVVGTALIKK
YPKLESEFVYGDYKVYDVRKMIAKSEQEIGKATAKYFFYSNIMNFFKTEI
TLAMNHRVEITEGILADECAALLCYFFRMPRQVFNAQKKAQSSTDGSSGS
ETPGTSESATPESSGSEVEFSHEYWMRHALTLAKRARDEREVPVGAVLVL
NNRVIGEGWNRAIGLHDPTAHAEIMALRQGGLVMQNYRLIDATLYVTFEP
CVMCAGAMIHSRIGRVVFGVRNAKTGAAGSLMDVLHYPGNGEIRKRPLIE
TNGETGEIVWDKGRDFATVRKVLSMPQVNIVKKTEVQTGGFSKESILPKR
NSDKLIARKKDWDPKKYGGFDSPTVAYSVLVVAKVEKGKSKKLKSVKELL
GITIMERSSFEKNPIDFLEAKGYKEVKKDLIIKLPKYSLFELENGRKRML
ASAGELQKGNELALPSKYVNFLYLASHYEKLKGSPEDNEQKQLFVEQHKH
YLDEIIEQISEFSKRVILADANLDKVLSAYNKHRDKPIREQAENIIHLFT
LTNLGAPAAFKYFDTTIDRKRYTSTKEVLDATLIHQSITGLYETRIDLSQ
LGGD
122 Cas9 TadACP136ins 1041
MDKKYSIGLAIGTNSVGWAVITDEYKVPSKKFKVLGNTDRHSIKKNLIGA
LLFDSGETAEATRLKRTARRRYTRRKNRICYLQEIFSNEMAKVDDSFFHR
LEESFLVEEDKKHERHPIFGNIVDEVAYHEKYPTIYHLRKKLVDSTDKAD
LRLIYLALAHMIKFRGHFLIEGDLNPDNSDVDKLFIQLVQTYNQLFEENP
INASGVDAKAILSARLSKSRRLENLIAQLPGEKKNGLFGNLIALSLGLTP
NFKSNFDLAEDAKLQLSKDTYDDDLDNLLAQIGDQYADLFLAAKNLSDAI
LLSDILRVNTEITKAPLSASMIKRYDEHHQDLTLLKALVRQQLPEKYKEI
FFDQSKNGYAGYIDGGASQEEFYKFIKPILEKMDGTEELLVKLNREDLLR
KQRTFDNGSIPHQIHLGELHAILRRQEDFYPFLKDNREKIEKILTFRIPY
YVGPLARGNSRFAWMTRKSEETITPWNFEEVVDKGASAQSFIERMTNFDK
NLPNEKVLPKHSLLYEYFTVYNELTKVKYVTEGMRKPAFLSGEQKKAIVD
LLFKTNRKVTVKQLKEDYFKKIECFDSVEISGVEDRFNASLGTYHDLLKI
IKDKDFLDNEENEDILEDIVLTLTLFEDREMIEERLKTYAHLFDDKVMKQ
LKRRRYTGWGRLSRKLINGIRDKQSGKTILDFLKSDGFANRNFMQLIHDD
SLTFKEDIQKAQVSGQGDSLHEHIANLAGSPAIKKGILQTVKVVDELVKV
MGRHKPENIVIEMARENQTTQKGQKNSRERMKRIEEGIKELGSQILKEHP
VENTQLQNEKLYLYYLQNGRDMYVDQELDINRLSDYDVDHIVPQSFLKDD
SIDNKVLTRSDKNRGKSDNVPSEEVVKKMKNYWRQLLNAKLITQRKFDNL
TKAERGGLSELDKAGFIKRQLVETRQITKHVAQILDSRMNTKYDENDKLI
REVKVITLKSKLVSDFRKDFQFYKVREINNYHHAHDAYLNAVVGTALIKK
YPKLESEFVYGDYKVYDVRKMIAKSEQEIGKATAKYFFYSMNHRVEITEG
ILADECAALLCYFFRMPRQVFNAQKKAQSSTDGSSGSETPGTSESATPES
SGSEVEFSHEYWMRHALTLAKRARDEREVPVGAVLVLNNRVIGEGWNRAI
GLHDPTAHAEIMALRQGGLVMQNYRLIDATLYVTFEPCVMCAGAMIHSRI
GRVVFGVRNAKTGAAGSLMDVLHYPGNIMNFFKTEITLANGEIRKRPLIE
TNGETGEIVWDKGRDFATVRKVLSMPQVNIVKKTEVQTGGFSKESILPKR
NSDKLIARKKDWDPKKYGGFDSPTVAYSVLVVAKVEKGKSKKLKSVKELL
GITIMERSSFEKNPIDFLEAKGYKEVKKDLIIKLPKYSLFELENGRKRML
ASAGELQKGNELALPSKYVNFLYLASHYEKLKGSPEDNEQKQLFVEQHKH
YLDEIIEQISEFSKRVILADANLDKVLSAYNKHRDKPIREQAENIIHLFT
LTNLGAPAAFKYFDTTIDRKRYTSTKEVLDATLIHQSITGLYETRIDLSQ
LGGD
123 Cas9 TadACP139ins 1299
MDKKYSIGLAIGTNSVGWAVITDEYKVPSKKFKVLGNTDRHSIKKNLIGA
LLFDSGETAEATRLKRTARRRYTRRKNRICYLQEIFSNEMAKVDDSFFHR
LEESFLVEEDKKHERHPIFGNIVDEVAYHEKYPTIYHLRKKLVDSTDKAD
LRLIYLALAHMIKFRGHFLIEGDLNPDNSDVDKLFIQLVQTYNQLFEENP
INASGVDAKAILSARLSKSRRLENLIAQLPGEKKNGLFGNLIALSLGLTP
NFKSNFDLAEDAKLQLSKDTYDDDLDNLLAQIGDQYADLFLAAKNLSDAI
LLSDILRVNTEITKAPLSASMIKRYDEHHQDLTLLKALVRQQLPEKYKEI
FFDQSKNGYAGYIDGGASQEEFYKFIKPILEKMDGTEELLVKLNREDLLR
KQRTFDNGSIPHQIHLGELHAILRRQEDFYPFLKDNREKIEKILTFRIPY
YVGPLARGNSRFAWMTRKSEETITPWNFEEVVDKGASAQSFIERMTNFDK
NLPNEKVLPKHSLLYEYFTVYNELTKVKYVTEGMRKPAFLSGEQKKAIVD
LLFKTNRKVTVKQLKEDYFKKIECFDSVEISGVEDRFNASLGTYHDLLKI
IKDKDFLDNEENEDILEDIVLTLTLFEDREMIEERLKTYAHLFDDKVMKQ
LKRRRYTGWGRLSRKLINGIRDKQSGKTILDFLKSDGFANRNFMQLIHDD
SLTFKEDIQKAQVSGQGDSLHEHIANLAGSPAIKKGILQTVKVVDELVKV
MGRHKPENIVIEMARENQTTQKGQKNSRERMKRIEEGIKELGSQILKEHP
VENTQLQNEKLYLYYLQNGRDMYVDQELDINRLSDYDVDHIVPQSFLKDD
SIDNKVLTRSDKNRGKSDNVPSEEVVKKMKNYWRQLLNAKLITQRKFDNL
TKAERGGLSELDKAGFIKRQLVETRQITKHVAQILDSRMNTKYDENDKLI
REVKVITLKSKLVSDFRKDFQFYKVREINNYHHAHDAYLNAVVGTALIKK
YPKLESEFVYGDYKVYDVRKMIAKSEQEIGKATAKYFFYSNIMNFFKTEI
TLANGEIRKRPLIETNGETGEIVWDKGRDFATVRKVLSMPQVNIVKKTEV
QTGGFSKESILPKRNSDKLIARKKDWDPKKYGGFDSPTVAYSVLVVAKVE
KGKSKKLKSVKELLGITIMERSSFEKNPIDFLEAKGYKEVKKDLIIKLPK
YSLFELENGRKRMLASAGELQKGNELALPSKYVNFLYLASHYEKLKGSPE
DNEQKQLFVEQHKHYLDEIIEQISEFSKRVILADANLDKVLSAYNKHRMN
HRVEITEGILADECAALLCYEFRMPRQVENAQKKAQSSTDGSSGSETPGT
SESATPESSGSEVEFSHEYWMRHALTLAKRARDEREVPVGAVLVLNNRVI
GEGWNRAIGLHDPTAHAEIMALRQGGLVMQNYRLIDATLYVTFEPCVMCA
GAMIHSRIGRVVFGVRNAKTGAAGSLMDVLHYPGDKPIREQAENIIHLFT
LTNLGAPAAFKYFDTTIDRKRYTSTKEVLDATLIHQSITGLYETRIDLSQ
LGGD
124 Cas9 delta 792-872 TadAins
MDKKYSIGLAIGTNSVGWAVITDEYKVPSKKFKVLGNTDRHSIKKNLIGA
LLFDSGETAEATRLKRTARRRYTRRKNRICYLQEIFSNEMAKVDDSFFHR
LEESFLVEEDKKHERHPIFGNIVDEVAYHEKYPTIYHLRKKLVDSTDKAD
LRLIYLALAHMIKFRGHFLIEGDLNPDNSDVDKLFIQLVQTYNQLFEENP
INASGVDAKAILSARLSKSRRLENLIAQLPGEKKNGLFGNLIALSLGLTP
NFKSNFDLAEDAKLQLSKDTYDDDLDNLLAQIGDQYADLFLAAKNLSDAI
LLSDILRVNTEITKAPLSASMIKRYDEHHQDLTLLKALVRQQLPEKYKEI
FFDQSKNGYAGYIDGGASQEEFYKFIKPILEKMDGTEELLVKLNREDLLR
KQRTFDNGSIPHQIHLGELHAILRRQEDFYPFLKDNREKIEKILTFRIPY
YVGPLARGNSRFAWMTRKSEETITPWNFEEVVDKGASAQSFIERMTNFDK
NLPNEKVLPKHSLLYEYFTVYNELTKVKYVTEGMRKPAFLSGEQKKAIVD
LLFKTNRKVTVKQLKEDYFKKIECFDSVEISGVEDRFNASLGTYHDLLKI
IKDKDFLDNEENEDILEDIVLTLTLFEDREMIEERLKTYAHLFDDKVMKQ
LKRRRYTGWGRLSRKLINGIRDKQSGKTILDFLKSDGFANRNFMQLIHDD
SLTFKEDIQKAQVSGQGDSLHEHIANLAGSPAIKKGILQTVKVVDELVKV
MGRHKPENIVIEMARENQTTQKGQKNSRERMKRIEEGIKELGSEVEFSHE
YWMRHALTLAKRARDEREVPVGAVLVLNNRVIGEGWNRAIGLHDPTAHAE
IMALRQGGLVMQNYRLIDATLYVTFEPCVMCAGAMIHSRIGRVVFGVRNA
KTGAAGSLMDVLHYPGMNHRVEITEGILADECAALLCYFFRMPRQVFNAQ
KKAQSSTDEEVVKKMKNYWRQLLNAKLITQRKFDNLTKAERGGLSELDKA
GFIKRQLVETRQITKHVAQILDSRMNTKYDENDKLIREVKVITLKSKLVS
DFRKDFQFYKVREINNYHHAHDAYLNAVVGTALIKKYPKLESEFVYGDYK
VYDVRKMIAKSEQEIGKATAKYFFYSNIMNFFKTEITLANGEIRKRPLIE
TNGETGEIVWDKGRDFATVRKVLSMPQVNIVKKTEVQTGGFSKESILPKR
NSDKLIARKKDWDPKKYGGFDSPTVAYSVLVVAKVEKGKSKKLKSVKELL
GITIMERSSFEKNPIDFLEAKGYKEVKKDLIIKLPKYSLFELENGRKRML
ASAGELQKGNELALPSKYVNFLYLASHYEKLKGSPEDNEQKQLEVEQHKH
YLDEIIEQISEFSKRVILADANLDKVLSAYNKHRDKPIREQAENIIHLFT
LTNLGAPAAFKYFDTTIDRKRYTSTKEVLDATLIHQSITGLYETRIDLSQ
LGGD
125 Cas9 delta 792-906 TadAins
MDKKYSIGLAIGTNSVGWAVITDEYKVPSKKFKVLGNTDRHSIKKNLIGA
LLFDSGETAEATRLKRTARRRYTRRKNRICYLQEIFSNEMAKVDDSFFHR
LEESFLVEEDKKHERHPIFGNIVDEVAYHEKYPTIYHLRKKLVDSTDKAD
LRLIYLALAHMIKFRGHFLIEGDLNPDNSDVDKLFIQLVQTYNQLFEENP
INASGVDAKAILSARLSKSRRLENLIAQLPGEKKNGLFGNLIALSLGLTP
NFKSNFDLAEDAKLQLSKDTYDDDLDNLLAQIGDQYADLFLAAKNLSDAI
LLSDILRVNTEITKAPLSASMIKRYDEHHQDLTLLKALVRQQLPEKYKEI
FFDQSKNGYAGYIDGGASQEEFYKFIKPILEKMDGTEELLVKLNREDLLR
KQRTFDNGSIPHQIHLGELHAILRRQEDFYPFLKDNREKIEKILTFRIPY
YVGPLARGNSRFAWMTRKSEETITPWNFEEVVDKGASAQSFIERMTNFDK
NLPNEKVLPKHSLLYEYFTVYNELTKVKYVTEGMRKPAFLSGEQKKAIVD
LLFKTNRKVTVKQLKEDYFKKIECFDSVEISGVEDRFNASLGTYHDLLKI
IKDKDFLDNEENEDILEDIVLTLTLFEDREMIEERLKTYAHLFDDKVMKQ
LKRRRYTGWGRLSRKLINGIRDKQSGKTILDFLKSDGFANRNFMQLIHDD
SLTFKEDIQKAQVSGQGDSLHEHIANLAGSPAIKKGILQTVKVVDELVKV
MGRHKPENIVIEMARENQTTQKGQKNSRERMKRIEEGIKELGSEVEFSHE
YWMRHALTLAKRARDEREVPVGAVLVLNNRVIGEGWNRAIGLHDPTAHAE
IMALRQGGLVMQNYRLIDATLYVTFEPCVMCAGAMIHSRIGRVVFGVRNA
KTGAAGSLMDVLHYPGMNHRVEITEGILADECAALLCYFFRMPRQVFNAQ
KKAQSSTDGLSELDKAGFIKRQLVETRQITKHVAQILDSRMNTKYDENDK
LIREVKVITLKSKLVSDFRKDFQFYKVREINNYHHAHDAYLNAVVGTALI
KKYPKLESEFVYGDYKVYDVRKMIAKSEQEIGKATAKYFFYSNIMNFFKT
EITLANGEIRKRPLIETNGETGEIVWDKGRDFATVRKVLSMPQVNIVKKT
EVQTGGFSKESILPKRNSDKLIARKKDWDPKKYGGFDSPTVAYSVLVVAK
VEKGKSKKLKSVKELLGITIMERSSFEKNPIDFLEAKGYKEVKKDLIIKL
PKYSLFELENGRKRMLASAGELQKGNELALPSKYVNFLYLASHYEKLKGS
PEDNEQKQLFVEQHKHYLDEIIEQISEFSKRVILADANLDKVLSAYNKHR
DKPIREQAENIIHLFTLTNLGAPAAFKYFDTTIDRKRYTSTKEVLDATLI
HQSITGLYETRIDLSQLGGD
126 TadA CP65ins 1003
MDKKYSIGLAIGTNSVGWAVITDEYKVPSKKFKVLGNTDRHSIKKNLIGA
LLFDSGETAEATRLKRTARRRYTRRKNRICYLQEIFSNEMAKVDDSFFHR
LEESFLVEEDKKHERHPIFGNIVDEVAYHEKYPTIYHLRKKLVDSTDKAD
LRLIYLALAHMIKFRGHFLIEGDLNPDNSDVDKLFIQLVQTYNQLFEENP
INASGVDAKAILSARLSKSRRLENLIAQLPGEKKNGLFGNLIALSLGLTP
NFKSNFDLAEDAKLQLSKDTYDDDLDNLLAQIGDQYADLFLAAKNLSDAI
LLSDILRVNTEITKAPLSASMIKRYDEHHQDLTLLKALVRQQLPEKYKEI
FFDQSKNGYAGYIDGGASQEEFYKFIKPILEKMDGTEELLVKLNREDLLR
KQRTFDNGSIPHQIHLGELHAILRRQEDFYPFLKDNREKIEKILTFRIPY
YVGPLARGNSRFAWMTRKSEETITPWNFEEVVDKGASAQSFIERMTNFDK
NLPNEKVLPKHSLLYEYFTVYNELTKVKYVTEGMRKPAFLSGEQKKAIVD
LLFKTNRKVTVKQLKEDYFKKIECFDSVEISGVEDRFNASLGTYHDLLKI
IKDKDFLDNEENEDILEDIVLTLTLFEDREMIEERLKTYAHLFDDKVMKQ
LKRRRYTGWGRLSRKLINGIRDKQSGKTILDFLKSDGFANRNFMQLIHDD
SLTFKEDIQKAQVSGQGDSLHEHIANLAGSPAIKKGILQTVKVVDELVKV
MGRHKPENIVIEMARENQTTQKGQKNSRERMKRIEEGIKELGSQILKEHP
VENTQLQNEKLYLYYLQNGRDMYVDQELDINRLSDYDVDHIVPQSFLKDD
SIDNKVLTRSDKNRGKSDNVPSEEVVKKMKNYWRQLLNAKLITQRKFDNL
TKAERGGLSELDKAGFIKRQLVETRQITKHVAQILDSRMNTKYDENDKLI
REVKVITLKSKLVSDFRKDFQFYKVREINNYHHAHDAYLNAVVGTALIKK
YPKTAHAEIMALRQGGLVMONYRLIDATLYVTFEPCVMCAGAMIHSRIGR
VVFGVRNAKTGAAGSLMDVLHYPGMNHRVEITEGILADECAALLCYFFRM
PRQVFNAQKKAQSSTDGSSGSETPGTSESATPESSGSEVEFSHEYWMRHA
LTLAKRARDEREVPVGAVLVLNNRVIGEGWNRAIGLHDPLESEFVYGDYK
VYDVRKMIAKSEQEIGKATAKYFFYSNIMNFFKTEITLANGEIRKRPLIE
TNGETGEIVWDKGRDFATVRKVLSMPQVNIVKKTEVQTGGFSKESILPKR
NSDKLIARKKDWDPKKYGGFDSPTVAYSVLVVAKVEKGKSKKLKSVKELL
GITIMERSSFEKNPIDFLEAKGYKEVKKDLIIKLPKYSLFELENGRKRML
ASAGELQKGNELALPSKYVNFLYLASHYEKLKGSPEDNEQKQLFVEQHKH
YLDEIIEQISEFSKRVILADANLDKVLSAYNKHRDKPIREQAENIIHLFT
LTNLGAPAAFKYFDTTIDRKRYTSTKEVLDATLIHQSITGLYETRIDLSQ
LGGD
127 TadA CP65ins 1016
MDKKYSIGLAIGTNSVGWAVITDEYKVPSKKFKVLGNTDRHSIKKNLIGA
LLFDSGETAEATRLKRTARRRYTRRKNRICYLQEIFSNEMAKVDDSFFHR
LEESFLVEEDKKHERHPIFGNIVDEVAYHEKYPTIYHLRKKLVDSTDKAD
LRLIYLALAHMIKFRGHFLIEGDLNPDNSDVDKLFIQLVQTYNQLFEENP
INASGVDAKAILSARLSKSRRLENLIAQLPGEKKNGLFGNLIALSLGLTP
NFKSNFDLAEDAKLQLSKDTYDDDLDNLLAQIGDQYADLFLAAKNLSDAI
LLSDILRVNTEITKAPLSASMIKRYDEHHQDLTLLKALVRQQLPEKYKEI
FFDQSKNGYAGYIDGGASQEEFYKFIKPILEKMDGTEELLVKLNREDLLR
KQRTFDNGSIPHQIHLGELHAILRRQEDFYPFLKDNREKIEKILTFRIPY
YVGPLARGNSRFAWMTRKSEETITPWNFEEVVDKGASAQSFIERMTNFDK
NLPNEKVLPKHSLLYEYFTVYNELTKVKYVTEGMRKPAFLSGEQKKAIVD
LLFKTNRKVTVKQLKEDYFKKIECFDSVEISGVEDRFNASLGTYHDLLKI
IKDKDFLDNEENEDILEDIVLTLTLFEDREMIEERLKTYAHLFDDKVMKQ
LKRRRYTGWGRLSRKLINGIRDKQSGKTILDFLKSDGFANRNFMQLIHDD
SLTFKEDIQKAQVSGQGDSLHEHIANLAGSPAIKKGILQTVKVVDELVKV
MGRHKPENIVIEMARENQTTQKGQKNSRERMKRIEEGIKELGSQILKEHP
VENTQLQNEKLYLYYLQNGRDMYVDQELDINRLSDYDVDHIVPQSFLKDD
SIDNKVLTRSDKNRGKSDNVPSEEVVKKMKNYWRQLLNAKLITQRKFDNL
TKAERGGLSELDKAGFIKRQLVETRQITKHVAQILDSRMNTKYDENDKLI
REVKVITLKSKLVSDFRKDFQFYKVREINNYHHAHDAYLNAVVGTALIKK
YPKLESEFVYGDYKVTAHAEIMALRQGGLVMQNYRLIDATLYVTFEPCVM
CAGAMIHSRIGRVVFGVRNARTGAAGSLMDVLHYPGMNHRVEITEGILAD
ECAALLCYFFRMPRQVFNAQKKAQSSTDGSSGSETPGTSESATPESSGSE
VEFSHEYWMRHALTLAKRARDEREVPVGAVLVLNNRVIGEGWNRAIGLHD
PYDVRKMIAKSEQEIGKATAKYFFYSNIMNFFKTEITLANGEIRKRPLIE
TNGETGEIVWDKGRDFATVRKVLSMPQVNIVKKTEVQTGGFSKESILPKR
NSDKLIARKKDWDPKKYGGFDSPTVAYSVLVVAKVEKGKSKKLKSVKELL
GITIMERSSFEKNPIDFLEAKGYKEVKKDLIIKLPKYSLFELENGRKRML
ASAGELQKGNELALPSKYVNFLYLASHYEKLKGSPEDNEQKQLFVEQHKH
YLDEIIEQISEFSKRVILADANLDKVLSAYNKHRDKPIREQAENIIHLFT
LTNLGAPAAFKYFDTTIDRKRYTSTKEVLDATLIHQSITGLYETRIDLSQ
LGGD
128 TadA CP65ins 1022
MDKKYSIGLAIGTNSVGWAVITDEYKVPSKKFKVLGNTDRHSIKKNLIGA
LLFDSGETAEATRLKRTARRRYTRRKNRICYLQEIFSNEMAKVDDSFFHR
LEESFLVEEDKKHERHPIFGNIVDEVAYHEKYPTIYHLRKKLVDSTDKAD
LRLIYLALAHMIKFRGHFLIEGDLNPDNSDVDKLFIQLVQTYNQLFEENP
INASGVDAKAILSARLSKSRRLENLIAQLPGEKKNGLFGNLIALSLGLTP
NFKSNFDLAEDAKLQLSKDTYDDDLDNLLAQIGDQYADLFLAAKNLSDAI
LLSDILRVNTEITKAPLSASMIKRYDEHHQDLTLLKALVRQQLPEKYKEI
FFDQSKNGYAGYIDGGASQEEFYKFIKPILEKMDGTEELLVKLNREDLLR
KQRTFDNGSIPHQIHLGELHAILRRQEDFYPFLKDNREKIEKILTFRIPY
YVGPLARGNSRFAWMTRKSEETITPWNFEEVVDKGASAQSFIERMTNFDK
NLPNEKVLPKHSLLYEYFTVYNELTKVKYVTEGMRKPAFLSGEQKKAIVD
LLFKTNRKVTVKQLKEDYFKKIECFDSVEISGVEDRFNASLGTYHDLLKI
IKDKDFLDNEENEDILEDIVLTLTLFEDREMIEERLKTYAHLFDDKVMKQ
LKRRRYTGWGRLSRKLINGIRDKQSGKTILDFLKSDGFANRNFMQLIHDD
SLTFKEDIQKAQVSGQGDSLHEHIANLAGSPAIKKGILQTVKVVDELVKV
MGRHKPENIVIEMARENQTTQKGQKNSRERMKRIEEGIKELGSQILKEHP
VENTQLQNEKLYLYYLQNGRDMYVDQELDINRLSDYDVDHIVPQSFLKDD
SIDNKVLTRSDKNRGKSDNVPSEEVVKKMKNYWRQLLNAKLITQRKFDNL
TKAERGGLSELDKAGFIKRQLVETRQITKHVAQILDSRMNTKYDENDKLI
REVKVITLKSKLVSDFRKDFQFYKVREINNYHHAHDAYLNAVVGTALIKK
YPKLESEFVYGDYKVYDVRKMITAHAEIMALRQGGLVMONYRLIDATLYV
TFEPCVMCAGAMIHSRIGRVVFGVRNAKTGAAGSLMDVLHYPGMNHRVEI
TEGILADECAALLCYFFRMPRQVFNAQKKAQSSTDGSSGSETPGTSESAT
PESSGSEVEFSHEYWMRHALTLAKRARDEREVPVGAVLVLNNRVIGEGWN
RAIGLHDPAKSEQEIGKATAKYFFYSNIMNFFKTEITLANGEIRKRPLIE
TNGETGEIVWDKGRDFATVRKVLSMPQVNIVKKTEVQTGGFSKESILPKR
NSDKLIARKKDWDPKKYGGFDSPTVAYSVLVVAKVEKGKSKKLKSVKELL
GITIMERSSFEKNPIDFLEAKGYKEVKKDLIIKLPKYSLFELENGRKRML
ASAGELQKGNELALPSKYVNFLYLASHYEKLKGSPEDNEQKQLFVEQHKH
YLDEIIEQISEFSKRVILADANLDKVLSAYNKHRDKPIREQAENIIHLFT
LTNLGAPAAFKYFDTTIDRKRYTSTKEVLDATLIHQSITGLYETRIDLSQ
LGGD
129 TadA CP65ins 1029
MDKKYSIGLAIGTNSVGWAVITDEYKVPSKKFKVLGNTDRHSIKKNLIGA
LLFDSGETAEATRLKRTARRRYTRRKNRICYLQEIFSNEMAKVDDSFFHR
LEESFLVEEDKKHERHPIFGNIVDEVAYHEKYPTIYHLRKKLVDSTDKAD
LRLIYLALAHMIKFRGHFLIEGDLNPDNSDVDKLFIQLVQTYNQLFEENP
INASGVDAKAILSARLSKSRRLENLIAQLPGEKKNGLFGNLIALSLGLTP
NFKSNFDLAEDAKLQLSKDTYDDDLDNLLAQIGDQYADLFLAAKNLSDAI
LLSDILRVNTEITKAPLSASMIKRYDEHHQDLTLLKALVRQQLPEKYKEI
FFDQSKNGYAGYIDGGASQEEFYKFIKPILEKMDGTEELLVKLNREDLLR
KQRTFDNGSIPHQIHLGELHAILRRQEDFYPFLKDNREKIEKILTFRIPY
YVGPLARGNSRFAWMTRKSEETITPWNFEEVVDKGASAQSFIERMTNFDK
NLPNEKVLPKHSLLYEYFTVYNELTKVKYVTEGMRKPAFLSGEQKKAIVD
LLFKTNRKVTVKQLKEDYFKKIECFDSVEISGVEDRFNASLGTYHDLLKI
IKDKDFLDNEENEDILEDIVLTLTLFEDREMIEERLKTYAHLFDDKVMKQ
LKRRRYTGWGRLSRKLINGIRDKQSGKTILDFLKSDGFANRNFMQLIHDD
SLTFKEDIQKAQVSGQGDSLHEHIANLAGSPAIKKGILQTVKVVDELVKV
MGRHKPENIVIEMARENQTTQKGQKNSRERMKRIEEGIKELGSQILKEHP
VENTQLQNEKLYLYYLQNGRDMYVDQELDINRLSDYDVDHIVPQSFLKDD
SIDNKVLTRSDKNRGKSDNVPSEEVVKKMKNYWRQLLNAKLITQRKFDNL
TKAERGGLSELDKAGFIKRQLVETRQITKHVAQILDSRMNTKYDENDKLI
REVKVITLKSKLVSDFRKDFQFYKVREINNYHHAHDAYLNAVVGTALIKK
YPKLESEFVYGDYKVYDVRKMIAKSEQEITAHAEIMALRQGGLVMQNYRL
IDATLYVTFEPCVMCAGAMIHSRIGRVVFGVRNAKTGAAGSLMDVLHYPG
MNHRVEITEGILADECAALLCYFFRMPRQVFNAQKKAQSSTDGSSGSETP
GTSESATPESSGSEVEFSHEYWMRHALTLAKRARDEREVPVGAVLVLNNR
VIGEGWNRAIGLHDPGKATAKYFFYSNIMNFFKTEITLANGEIRKRPLIE
TNGETGEIVWDKGRDFATVRKVLSMPQVNIVKKTEVQTGGFSKESILPKR
NSDKLIARKKDWDPKKYGGFDSPTVAYSVLVVAKVEKGKSKKLKSVKELL
GITIMERSSFEKNPIDFLEAKGYKEVKKDLIIKLPKYSLFELENGRKRML
ASAGELQKGNELALPSKYVNFLYLASHYEKLKGSPEDNEQKQLFVEQHKH
YLDEIIEQISEFSKRVILADANLDKVLSAYNKHRDKPIREQAENIIHLFT
LTNLGAPAAFKYFDTTIDRKRYTSTKEVLDATLIHQSITGLYETRIDLSQ
LGGD
130 TadA CP65ins 1041
MDKKYSIGLAIGTNSVGWAVITDEYKVPSKKFKVLGNTDRHSIKKNLIGA
LLFDSGETAEATRLKRTARRRYTRRKNRICYLQEIFSNEMAKVDDSFFHR
LEESFLVEEDKKHERHPIFGNIVDEVAYHEKYPTIYHLRKKLVDSTDKAD
LRLIYLALAHMIKFRGHFLIEGDLNPDNSDVDKLFIQLVQTYNQLFEENP
INASGVDAKAILSARLSKSRRLENLIAQLPGEKKNGLFGNLIALSLGLTP
NFKSNFDLAEDAKLQLSKDTYDDDLDNLLAQIGDQYADLFLAAKNLSDAI
LLSDILRVNTEITKAPLSASMIKRYDEHHQDLTLLKALVRQQLPEKYKEI
FFDQSKNGYAGYIDGGASQEEFYKFIKPILEKMDGTEELLVKLNREDLLR
KQRTFDNGSIPHQIHLGELHAILRRQEDFYPFLKDNREKIEKILTFRIPY
YVGPLARGNSRFAWMTRKSEETITPWNFEEVVDKGASAQSFIERMTNFDK
NLPNEKVLPKHSLLYEYFTVYNELTKVKYVTEGMRKPAFLSGEQKKAIVD
LLFKTNRKVTVKQLKEDYFKKIECFDSVEISGVEDRFNASLGTYHDLLKI
IKDKDFLDNEENEDILEDIVLTLTLFEDREMIEERLKTYAHLFDDKVMKQ
LKRRRYTGWGRLSRKLINGIRDKQSGKTILDFLKSDGFANRNFMQLIHDD
SLTFKEDIQKAQVSGQGDSLHEHIANLAGSPAIKKGILQTVKVVDELVKV
MGRHKPENIVIEMARENQTTQKGQKNSRERMKRIEEGIKELGSQILKEHP
VENTQLQNEKLYLYYLQNGRDMYVDQELDINRLSDYDVDHIVPQSFLKDD
SIDNKVLTRSDKNRGKSDNVPSEEVVKKMKNYWRQLLNAKLITQRKFDNL
TKAERGGLSELDKAGFIKRQLVETRQITKHVAQILDSRMNTKYDENDKLI
REVKVITLKSKLVSDFRKDFQFYKVREINNYHHAHDAYLNAVVGTALIKK
YPKLESEFVYGDYKVYDVRKMIAKSEQEIGKATAKYFFYSTAHAEIMALR
QGGLVMONYRLIDATLYVTFEPCVMCAGAMIHSRIGRVVFGVRNAKTGAA
GSLMDVLHYPGMNHRVEITEGILADECAALLCYFFRMPRQVFNAQKKAQS
STDGSSGSETPGTSESATPESSGSEVEFSHEYWMRHALTLAKRARDEREV
PVGAVLVLNNRVIGEGWNRAIGLHDPNIMNFFKTEITLANGEIRKRPLIE
TNGETGEIVWDKGRDFATVRKVLSMPQVNIVKKTEVQTGGFSKESILPKR
NSDKLIARKKDWDPKKYGGFDSPTVAYSVLVVAKVEKGKSKKLKSVKELL
GITIMERSSFEKNPIDFLEAKGYKEVKKDLIIKLPKYSLFELENGRKRML
ASAGELQKGNELALPSKYVNFLYLASHYEKLKGSPEDNEQKQLFVEQHKH
YLDEIIEQISEFSKRVILADANLDKVLSAYNKHRDKPIREQAENIIHLFT
LTNLGAPAAFKYFDTTIDRKRYTSTKEVLDATLIHQSITGLYETRIDLSQ
LGGD
131 TadA CP65ins 1054
MDKKYSIGLAIGTNSVGWAVITDEYKVPSKKFKVLGNTDRHSIKKNLIGA
LLFDSGETAEATRLKRTARRRYTRRKNRICYLQEIFSNEMAKVDDSFFHR
LEESFLVEEDKKHERHPIFGNIVDEVAYHEKYPTIYHLRKKLVDSTDKAD
LRLIYLALAHMIKFRGHFLIEGDLNPDNSDVDKLFIQLVQTYNQLFEENP
INASGVDAKAILSARLSKSRRLENLIAQLPGEKKNGLFGNLIALSLGLTP
NFKSNFDLAEDAKLQLSKDTYDDDLDNLLAQIGDQYADLFLAAKNLSDAI
LLSDILRVNTEITKAPLSASMIKRYDEHHQDLTLLKALVRQQLPEKYKEI
FFDQSKNGYAGYIDGGASQEEFYKFIKPILEKMDGTEELLVKLNREDLLR
KQRTFDNGSIPHQIHLGELHAILRRQEDFYPFLKDNREKIEKILTFRIPY
YVGPLARGNSRFAWMTRKSEETITPWNFEEVVDKGASAQSFIERMTNFDK
NLPNEKVLPKHSLLYEYFTVYNELTKVKYVTEGMRKPAFLSGEQKKAIVD
LLFKTNRKVTVKQLKEDYFKKIECFDSVEISGVEDRFNASLGTYHDLLKI
IKDKDFLDNEENEDILEDIVLTLTLFEDREMIEERLKTYAHLFDDKVMKQ
LKRRRYTGWGRLSRKLINGIRDKQSGKTILDFLKSDGFANRNFMQLIHDD
SLTFKEDIQKAQVSGQGDSLHEHIANLAGSPAIKKGILQTVKVVDELVKV
MGRHKPENIVIEMARENQTTQKGQKNSRERMKRIEEGIKELGSQILKEHP
VENTQLQNEKLYLYYLQNGRDMYVDQELDINRLSDYDVDHIVPQSFLKDD
SIDNKVLTRSDKNRGKSDNVPSEEVVKKMKNYWRQLLNAKLITQRKFDNL
TKAERGGLSELDKAGFIKRQLVETRQITKHVAQILDSRMNTKYDENDKLI
REVKVITLKSKLVSDFRKDFQFYKVREINNYHHAHDAYLNAVVGTALIKK
YPKLESEFVYGDYKVYDVRKMIAKSEQEIGKATAKYFFYSNIMNFFKTEI
TLANTAHAEIMALRQGGLVMQNYRLIDATLYVTFEPCVMCAGAMIHSRIG
RVVFGVRNAKTGAAGSLMDVLHYPGMNHRVEITEGILADECAALLCYFFR
MPRQVFNAQKKAQSSTDGSSGSETPGTSESATPESSGSEVEFSHEYWMRH
ALTLAKRARDEREVPVGAVLVLNNRVIGEGWNRAIGLHDPGEIRKRPLIE
TNGETGEIVWDKGRDFATVRKVLSMPQVNIVKKTEVQTGGFSKESILPKR
NSDKLIARKKDWDPKKYGGFDSPTVAYSVLVVAKVEKGKSKKLKSVKELL
GITIMERSSFEKNPIDFLEAKGYKEVKKDLIIKLPKYSLFELENGRKRML
ASAGELQKGNELALPSKYVNFLYLASHYEKLKGSPEDNEQKQLFVEQHKH
YLDEIIEQISEFSKRVILADANLDKVLSAYNKHRDKPIREQAENIIHLFT
LTNLGAPAAFKYFDTTIDRKRYTSTKEVLDATLIHQSITGLYETRIDLSQ
LGGD
132 TadA CP65ins 1246
MDKKYSIGLAIGTNSVGWAVITDEYKVPSKKFKVLGNTDRHSIKKNLIGA
LLFDSGETAEATRLKRTARRRYTRRKNRICYLQEIFSNEMAKVDDSFFHR
LEESFLVEEDKKHERHPIFGNIVDEVAYHEKYPTIYHLRKKLVDSTDKAD
LRLIYLALAHMIKFRGHFLIEGDLNPDNSDVDKLFIQLVQTYNQLFEENP
INASGVDAKAILSARLSKSRRLENLIAQLPGEKKNGLFGNLIALSLGLTP
NFKSNFDLAEDAKLQLSKDTYDDDLDNLLAQIGDQYADLFLAAKNLSDAI
LLSDILRVNTEITKAPLSASMIKRYDEHHQDLTLLKALVRQQLPEKYKEI
FFDQSKNGYAGYIDGGASQEEFYKFIKPILEKMDGTEELLVKLNREDLLR
KQRTFDNGSIPHQIHLGELHAILRRQEDFYPFLKDNREKIEKILTFRIPY
YVGPLARGNSRFAWMTRKSEETITPWNFEEVVDKGASAQSFIERMTNFDK
NLPNEKVLPKHSLLYEYFTVYNELTKVKYVTEGMRKPAFLSGEQKKAIVD
LLFKTNRKVTVKQLKEDYFKKIECFDSVEISGVEDRFNASLGTYHDLLKI
IKDKDFLDNEENEDILEDIVLTLTLFEDREMIEERLKTYAHLFDDKVMKQ
LKRRRYTGWGRLSRKLINGIRDKQSGKTILDFLKSDGFANRNFMQLIHDD
SLTFKEDIQKAQVSGQGDSLHEHIANLAGSPAIKKGILQTVKVVDELVKV
MGRHKPENIVIEMARENQTTQKGQKNSRERMKRIEEGIKELGSQILKEHP
VENTQLQNEKLYLYYLQNGRDMYVDQELDINRLSDYDVDHIVPQSFLKDD
SIDNKVLTRSDKNRGKSDNVPSEEVVKKMKNYWRQLLNAKLITQRKFDNL
TKAERGGLSELDKAGFIKRQLVETRQITKHVAQILDSRMNTKYDENDKLI
REVKVITLKSKLVSDFRKDFQFYKVREINNYHHAHDAYLNAVVGTALIKK
YPKLESEFVYGDYKVYDVRKMIAKSEQEIGKATAKYFFYSNIMNFFKTEI
TLANGEIRKRPLIETNGETGEIVWDKGRDFATVRKVLSMPQVNIVKKTEV
QTGGFSKESILPKRNSDKLIARKKDWDPKKYGGFDSPTVAYSVLVVAKVE
KGKSKKLKSVKELLGITIMERSSFEKNPIDFLEAKGYKEVKKDLIIKLPK
YSLFELENGRKRMLASAGELQKGNELALPSKYVNFLYLASHYEKLKGTAH
AEIMALRQGGLVMQNYRLIDATLYVTFEPCVMCAGAMIHSRIGRVVFGVR
NAKTGAAGSLMDVLHYPGMNHRVEITEGILADECAALLCYFFRMPRQVFN
AQKKAQSSTDGSSGSETPGTSESATPESSGSEVEFSHEYWMRHALTLAKR
ARDEREVPVGAVLVLNNRVIGEGWNRAIGLHDPSPEDNEQKQLFVEQHKH
YLDEIIEQISEFSKRVILADANLDKVLSAYNKHRDKPIREQAENIIHLFT
LTNLGAPAAFKYFDTTIDRKRYTSTKEVLDATLIHQSITGLYETRIDLSQ
LGGD

[0454] In some embodiments, adenosine deaminase base editors were generated to insert TadA or variants thereof into the Cas9 polypeptide at the identified positions.

[0455] Exemplary, yet nonlimiting, fusion proteins are described in International PCT Application Nos. PCT/US2020/016285 and U.S. Provisional Application Nos. 62/852,228 and 62/852,224, the contents of which are incorporated by reference herein in their entireties.

Cas9 Domains with Reduced PAM Specificity

[0456] Typically, Cas9 proteins, such as Cas9 from S. pyogenes (spCas9), require a canonical NGG PAM sequence to bind a particular nucleic acid region, where the “N” in “NGG” is adenosine (A), thymidine (T), or cytosine (C), and the G is guanosine. This may limit the ability to edit desired bases within a genome. In some embodiments, the base editing fusion proteins provided herein may need to be placed at a precise location, for example a region comprising a target base that is upstream of the PAM. See e.g., Komor, A. C., et al., “Programmable editing of a target base in genomic DNA without double-stranded DNA cleavage” Nature 533, 420-424 (2016), the entire contents of which are hereby incorporated by reference. Accordingly, in some embodiments, any of the fusion proteins provided herein may contain a Cas9 domain that is capable of binding a nucleotide sequence that does not contain a canonical (e.g., NGG) PAM sequence. Cas9 domains that bind to non-canonical PAM sequences have been described in the art and would be apparent to the skilled artisan. For example, Cas9 domains that bind non-canonical PAM sequences have been described in Kleinstiver, B. P., et al., “Engineered CRISPR-Cas9 nucleases with altered PAM specificities” Nature 523, 481-485 (2015); and Kleinstiver, B. P., et al., “Broadening the targeting range of Staphylococcus aureus CRISPR-Cas9 by modifying PAM recognition” Nature Biotechnology 33, 1293-1298 (2015); Nishimasu, H., et al., “Engineered CRISPR-Cas9 nuclease with expanded targeting space” Science. 2018 Sep. 21; 361(6408):1259-1262, Chatterjee, P., et al., Minimal PAM specificity of a highly similar SpCas9 ortholog” Sci Adv. 2018 Oct. 24; 4(10):eaau0766. doi: 10.1126/sciadv.aau0766, the entire contents of each are hereby incorporated by reference.

### Nucleobase Editing Domain

[0457] Described herein are base editors comprising a fusion protein that includes a polynucleotide programmable nucleotide binding domain and a nucleobase editing domain (e.g., a deaminase domain). The base editor can be programmed to edit one or more bases in a target polynucleotide sequence by interacting with a guide polynucleotide capable of recognizing the target sequence. Once the target sequence has been recognized, the base editor is anchored on the polynucleotide where editing is to occur and the deaminase domain components of the base editor can then edit a target base.

[0458] In some embodiments, the nucleobase editing domain includes a deaminase domain. As particularly described herein, the deaminase domain includes a cytosine deaminase or an adenosine deaminase. In some embodiments, the terms “cytosine deaminase” and “cytidine deaminase” can be used interchangeably. In some embodiments, the terms “adenine deaminase” and “adenosine deaminase” can be used interchangeably. Details of nucleobase editing proteins are described in International PCT Application Nos. PCT/2017/045381 (WO2018/027078) and PCT/US2016/058344 (WO2017/070632), each of which is incorporated herein by reference for its entirety. Also see Komor, A. C., et al., “Programmable editing of a target base in genomic DNA without double-stranded DNA cleavage” Nature 533, 420-424 (2016); Gaudelli, N. M., et al., “Programmable base editing of A•T to G•C in genomic DNA without DNA cleavage” Nature 551, 464-471 (2017); and Komor, A. C., et al., “Improved base excision repair inhibition and bacteriophage Mu Gam protein yields C:G-to-T:A base editors with higher efficiency and product purity” Science Advances 3:eaao4774 (2017), the entire contents of which are hereby incorporated by reference.

### A to G Editing

[0459] In some embodiments, a base editor described herein can comprise a deaminase domain which includes an adenosine deaminase. Such an adenosine deaminase domain of a base editor can facilitate the editing of an adenine (A) nucleobase to a guanine (G) nucleobase by deaminating the A to form inosine (I), which exhibits base pairing properties of G. Adenosine deaminase is capable of deaminating (i.e., removing an amine group) adenine of a deoxyadenosine residue in deoxyribonucleic acid (DNA).

[0460] In some embodiments, the nucleobase editors provided herein can be made by fusing together one or more protein domains, thereby generating a fusion protein. In certain embodiments, the fusion proteins provided herein comprise one or more features that improve the base editing activity (e.g., efficiency, selectivity, and specificity) of the fusion proteins. For example, the fusion proteins provided herein can comprise a Cas9 domain that has reduced nuclease activity. In some embodiments, the fusion proteins provided herein can have a Cas9 domain that does not have nuclease activity (dCas9), or a Cas9 domain that cuts one strand of a duplexed DNA molecule, referred to as a Cas9 nickase (nCas9). Without wishing to be bound by any particular theory, the presence of the catalytic residue (e.g., H840) maintains the activity of the Cas9 to cleave the non-edited (e.g., non-deaminated) strand containing a T opposite the targeted A. Mutation of the catalytic residue (e.g., D10 to A10) of Cas9 prevents cleavage of the edited strand containing the targeted A residue. Such Cas9 variants are able to generate a single-strand DNA break (nick) at a specific location based on the gRNA-defined target sequence, leading to repair of the non-edited strand, ultimately resulting in a T to C change on the non-edited strand. In some embodiments, an A-to-G base editor further comprises an inhibitor of inosine base excision repair, for example, a uracil glycosylase inhibitor (UGI) domain or a catalytically inactive inosine specific nuclease. Without wishing to be bound by any particular theory, the UGI domain or catalytically inactive inosine specific nuclease can inhibit or prevent base excision repair of a deaminated adenosine residue (e.g., inosine), which can improve the activity or efficiency of the base editor.

[0461] A base editor comprising an adenosine deaminase can act on any polynucleotide, including DNA, RNA and DNA-RNA hybrids. In certain embodiments, a base editor comprising an adenosine deaminase can deaminate a target A of a polynucleotide comprising RNA. For example, the base editor can comprise an adenosine deaminase domain capable of deaminating a target A of an RNA polynucleotide and/or a DNA-RNA hybrid polynucleotide. In an embodiment, an adenosine deaminase incorporated into a base editor comprises all or a portion of adenosine deaminase acting on RNA (ADAR, e.g., ADAR1 or ADAR2). In another embodiment, an adenosine deaminase incorporated into a base editor comprises all or a portion of adenosine deaminase acting on tRNA (ADAT). A base editor comprising an adenosine deaminase domain can also be capable of deaminating an A nucleobase of a DNA polynucleotide. In an embodiment an adenosine deaminase domain of a base editor comprises all or a portion of an ADAT comprising one or more mutations which permit the ADAT to deaminate a target A in DNA. For example, the base editor can comprise all or a portion of an ADAT from Escherichia coli (EcTadA) comprising one or more of the following mutations: D108N, A106V, D147Y, E155V, L84F, H123Y, I156F, or a corresponding mutation in another adenosine deaminase.

[0462] The adenosine deaminase can be derived from any suitable organism (e.g., E. coli). In some embodiments, the adenine deaminase is a naturally-occurring adenosine deaminase that includes one or more mutations corresponding to any of the mutations provided herein (e.g., mutations in ecTadA). The corresponding residue in any homologous protein can be identified by e.g., sequence alignment and determination of homologous residues. The mutations in any naturally-occurring adenosine deaminase (e.g., having homology to ecTadA) that corresponds to any of the mutations described herein (e.g., any of the mutations identified in ecTadA) can be generated accordingly.

### Adenosine Deaminases

[0463] In some embodiments, fusion proteins described herein can comprise a deaminase domain which includes an adenosine deaminase. Such an adenosine deaminase domain of a base editor can facilitate the editing of an adenine (A) nucleobase to a guanine (G) nucleobase by deaminating the A to form inosine (I), which exhibits base pairing properties of G. Adenosine deaminase is capable of deaminating (i.e., removing an amine group) adenine of a deoxyadenosine residue in deoxyribonucleic acid (DNA).

[0464] In some embodiments, the adenosine deaminases provided herein are capable of deaminating adenine. In some embodiments, the adenosine deaminases provided herein are capable of deaminating adenine in a deoxyadenosine residue of DNA. In some embodiments, the adenine deaminase is a naturally-occurring adenosine deaminase that includes one or more mutations corresponding to any of the mutations provided herein (e.g., mutations in ecTadA). One of skill in the art will be able to identify the corresponding residue in any homologous protein, e.g., by sequence alignment and determination of homologous residues. Accordingly, one of skill in the art would be able to generate mutations in any naturally-occurring adenosine deaminase (e.g., having homology to ecTadA) that corresponds to any of the mutations described herein, e.g., any of the mutations identified in ecTadA. In some embodiments, the adenosine deaminase is from a prokaryote. In some embodiments, the adenosine deaminase is from a bacterium. In some embodiments, the adenosine deaminase is from Escherichia coli, Staphylococcus aureus, Salmonella typhi, Shewanella putrefaciens, Haemophilus influenzae, Caulobacter crescentus, or Bacillus subtilis. In some embodiments, the adenosine deaminase is from E. coli.

[0465] The disclosure provides adenosine deaminase variants that have increased efficiency (>50-60%) and specificity. In particular, the adenosine deaminase variants described herein are more likely to edit a desired base within a polynucleotide, and are less likely to edit bases that are not intended to be altered (i.e., “bystanders”).

[0466] In particular embodiments, the TadA is any one of the TadA described in PCT/US2017/045381 (WO 2018/027078), which is incorporated herein by reference in its entirety.

[0467] In some embodiments, the nucleobase editors of the disclosure are adenosine deaminase variants comprising an alteration in the following sequence:

MSEVEFSHEYWMRHALTLAKRARDEREVPVGAVLVLNNRVIGEGWNRAIG
LHDPTAHAEIMALRQGGLVMQNYRLIDATLYVTFEPCVMCAGAMIHSRIG
RVVFGVRNAKTGAAGSLMDVLHYPGMNHRVEITEGILADECAALLCYFFR
MPRQVFNAQKKAQSSTD (also termed TadA*7.10).

[0468] In particular embodiments, the fusion proteins comprise a single (e.g., provided as a monomer) TadA*8 variant. In some embodiments, the TadA*8 is linked to a Cas9 nickase. In some embodiments, the fusion proteins of the disclosure comprise as a heterodimer of a wild-type TadA (TadA(wt)) linked to a TadA*8 variant. In other embodiments, the fusion proteins of the disclosure comprise as a heterodimer of a TadA*7.10 linked to a TadA*8 variant. In some embodiments, the base editor is ABE8 comprising a TadA*8 variant monomer. In some embodiments, the base editor is ABE8 comprising a heterodimer of a TadA*8 variant and a TadA(wt). In some embodiments, the base editor is ABE8 comprising a heterodimer of a TadA*8 variant and TadA*7.10. In some embodiments, the base editor is ABE8 comprising a heterodimer of a TadA*8 variant. In some embodiments, the TadA*8 variant is selected from Table 8, 10, 11, or 13. In some embodiments, the ABE8 is selected from Table 10, 11 or 13. The relevant sequences follow:

Wild-type TadA (TadA(wt)) or “the TadA reference
sequence”
MSEVEFSHEYWMRHALTLAKRAWDEREVPVGAVLVHNNRVIGEGWNRPIG
RHDPTAHAEIMALRQGGLVMQNYRLIDATLYVTLEPCVMCAGAMIHSRIG
RVVFGARDAKTGAAGSLMDVLHHPGMNHRVEITEGILADECAALLSDFFR
MRRQEIKAQKKAQSSTD
TadA*7.10:
MSEVEFSHEYW MRHALTLAKR ARDEREVPVG AVLVLNNRVI
GEGWNRAIGL HDPTAHAEIM ALRQGGLVMQ NYRLIDATLY
VTFEPCVMCA GAMIHSRIGR VVFGVRNAKT GAAGSLMDVL
HYPGMNHRVE ITEGILADEC AALLCYFFRM PRQVFNAQKK AQSSTD

[0469] In some embodiments, the adenosine deaminase comprises an amino acid sequence that is at least 60%, at least 65%, at least 70%, at least 75%, at least 80%, at least 85%, at least 90%, at least 95%, at least 96%, at least 97%, at least 98%, at least 99%, or at least 99.5% identical to any one of the amino acid sequences set forth in any of the adenosine deaminases provided herein. It should be appreciated that adenosine deaminases provided herein may include one or more mutations (e.g., any of the mutations provided herein). The disclosure provides any deaminase domains with a certain percent identity plus any of the mutations or combinations thereof described herein. In some embodiments, the adenosine deaminase comprises an amino acid sequence that has 1, 2, 3, 4, 5, 6, 7, 8, 9, 10, 11, 12, 13, 14, 15, 16, 17, 18, 19, 20, 21, 22, 21, 24, 25, 26, 27, 28, 29, 30, 31, 32, 33, 34, 35, 36, 37, 38, 39, 40, 41, 42, 43, 44, 45, 46, 47, 48, 49, 50, or more mutations compared to a reference sequence, or any of the adenosine deaminases provided herein. In some embodiments, the adenosine deaminase comprises an amino acid sequence that has at least 5, at least 10, at least 15, at least 20, at least 25, at least 30, at least 35, at least 40, at least 45, at least 50, at least 60, at least 70, at least 80, at least 90, at least 100, at least 110, at least 120, at least 130, at least 140, at least 150, at least 160, or at least 170 identical contiguous amino acid residues as compared to any one of the amino acid sequences known in the art or described herein.

[0470] In some embodiments the TadA deaminase is a full-length E. coli TadA deaminase. For example, in certain embodiments, the adenosine deaminase comprises the amino acid sequence:

MRRAFITGVFFLSEVEFSHEYWMRHALTLAKRAWDEREVPVGAVLVHNNR
VIGEGWNRPIGRHDPTAHAEIMALRQGGLVMQNYRLIDATLYVTLEPCVM
CAGAMIHSRIGRVVFGARDAKTGAAGSLMDVLHHPGMNHRVEITEGILAD
ECAALLSDFFRMRRQEIKAQKKAOSSTD.

[0471] It should be appreciated, however, that additional adenosine deaminases useful in the present application would be apparent to the skilled artisan and are within the scope of this disclosure. For example, the adenosine deaminase may be a homolog of adenosine deaminase acting on tRNA (ADAT). Without limitation, the amino acid sequences of exemplary AD AT homologs include the following:

Staphylococcus aureus TadA:
MGSHMTNDIYFMTLAIEEAKKAAQLGEVPIGAIITKDDEVIARAHNLRET
LQQPTAHAEHIAIERAAKVLGSWRLEGCTLYVTLEPCVMCAGTIVMSRIP
RVVYGADDPKGGCSGSLMNLLQQSNFNHRAIVDKGVLKEACSTLLTTFFK
NLRANKKSTN
Bacillus subtilis TadA:
MTQDELYMKEAIKEAKKAEEKGEVPIGAVLVINGEIIARAHNLRETEQRS
IAHAEMLVIDEACKALGTWRLEGATLYVTLEPCPMCAGAVVLSRVEKVVF
GAFDPKGGCSGTLMNLLQEERFNHQAEVVSGVLEEECGGMLSAFFRELRK
KKKAARKNLSE
Salmonella typhimurium (S. typhimurium) TadA:
MPPAFITGVTSLSDVELDHEYWMRHALTLAKRAWDEREVPVGAVLVHNHR
VIGEGWNRPIGRHDPTAHAEIMALRQGGLVLQNYRLLDTTLYVTLEPCVM
CAGAMVHSRIGRVVFGARDAKTGAAGSLIDVLHHPGMNHRVEIIEGVLRD
ECATLLSDFFRMRRQEIKALKKADRAEGAGPAV
Shewanella putrefaciens (S. putrefaciens) TadA:
MDEYWMQVAMQMAEKAEAAGEVPVGAVLVKDGQQIATGYNLSISQHDPTA
HAEILCLRSAGKKLENYRLLDATLYITLEPCAMCAGAMVHSRIARVVYGA
RDEKTGAAGTVVNLLQHPAFNHQVEVTSGVLAEACSAQLSRFFKRRRDEK
KALKLAQRAQQGIE
Haemophilus influenzae F3031 (H. influenzae) TadA:
MDAAKVRSEFDEKMMRYALELADKAEALGEIPVGAVLVDDARNIIGEGWN
LSIVQSDPTAHAEIIALRNGAKNIQNYRLLNSTLYVTLEPCTMCAGAILH
ISRKRLVFGASDYKTGAIGSRFHFFDDYKMNHTLEITSGVLAEECSQKLS
TFFQKRREEKKIEKALLKSLSDK
Caulobacter crescentus (C. crescentus) TadA:
MRTDESEDQDHRMMRLALDAARAAAEAGETPVGAVILDPSTGEVIATAGN
GPIAAHDPTAHAEIAAMRAAAAKLGNYRLTDLTLVVTLEPCAMCAGAISH
ARIGRVVFGADDPKGGAVVHGPKFFAQPTCHWRPEVTGGVLADESADLLR
GFFRARRKAKI
Geobacter sulfurreducens (G. sulfurreducens) TadA:
MSSLKKTPIRDDAYWMGKAIREAAKAAARDEVPIGAVIVRDGAVIGRGHN
LREGSNDPSAHAEMIAIRQAARRSANWRLTGATLYVTLEPCLMCMGAIIL
ARLERVVFGCYDPKGGAAGSLYDLSADPRLNHQVRLSPGVCQEECGTMLS
DFFRDLRRRKKAKATPALFIDERKVPPEP

An embodiment of E. coli TadA (ecTadA) includes the following:

MSEVEFSHEYWMRHALTLAKRARDEREVPVGAVLVLNNRVIGEGWNRAIG
LHDPTAHAEIMALRQGGLVMQNYRLIDATLYVTFEPCVMCAGAMIHSRIG
RVVFGVRNAKTGAAGSLMDVLHYPGMNHRVEITEGILADECAALLCYFFR
MPRQVFNAQKKAQSSTD

[0472] In some embodiments, the adenosine deaminase is from a prokaryote. In some embodiments, the adenosine deaminase is from a bacterium. In some embodiments, the adenosine deaminase is from Escherichia coli, Staphylococcus aureus, Salmonella typhi, Shewanella putrefaciens, Haemophilus influenzae, Caulobacter crescentus, or Bacillus subtilis. In some embodiments, the adenosine deaminase is from E. coli.

[0473] In one embodiment, a fusion protein of the disclosure comprises a wild-type TadA linked to TadA*7.10, which is linked to Cas9 nickase. In particular embodiments, the fusion proteins comprise a single TadA*7.10 domain (e.g., provided as a monomer). In other embodiments, the ABE7.10 editor comprises TadA*7.10 and TadA(wt), which are capable of forming heterodimers.

[0474] In some embodiments, the adenosine deaminase comprises an amino acid sequence that is at least 60%, at least 65%, at least 70%, at least 75%, at least 80%, at least 85%, at least 90%, at least 95%, at least 96%, at least 97%, at least 98%, at least 99%, or at least 99.5% identical to any one of the amino acid sequences set forth in any of the adenosine deaminases provided herein. It should be appreciated that adenosine deaminases provided herein may include one or more mutations (e.g., any of the mutations provided herein). The disclosure provides any deaminase domains with a certain percent identity plus any of the mutations or combinations thereof described herein. In some embodiments, the adenosine deaminase comprises an amino acid sequence that has 1, 2, 3, 4, 5, 6, 7, 8, 9, 10, 11, 12, 13, 14, 15, 16, 17, 18, 19, 20, 21, 22, 21, 24, 25, 26, 27, 28, 29, 30, 31, 32, 33, 34, 35, 36, 37, 38, 39, 40, 41, 42, 43, 44, 45, 46, 47, 48, 49, 50, or more mutations compared to a reference sequence, or any of the adenosine deaminases provided herein. In some embodiments, the adenosine deaminase comprises an amino acid sequence that has at least 5, at least 10, at least 15, at least 20, at least 25, at least 30, at least 35, at least 40, at least 45, at least 50, at least 60, at least 70, at least 80, at least 90, at least 100, at least 110, at least 120, at least 130, at least 140, at least 150, at least 160, or at least 170 identical contiguous amino acid residues as compared to any one of the amino acid sequences known in the art or described herein.

[0475] It should be appreciated that any of the mutations provided herein (e.g., based on the TadA reference sequence) can be introduced into other adenosine deaminases, such as E. coli TadA (ecTadA), S. aureus TadA (saTadA), or other adenosine deaminases (e.g., bacterial adenosine deaminases). It would be apparent to the skilled artisan that additional deaminases may similarly be aligned to identify homologous amino acid residues that can be mutated as provided herein. Thus, any of the mutations identified in the TadA reference sequence can be made in other adenosine deaminases (e.g., ecTada) that have homologous amino acid residues. It should also be appreciated that any of the mutations provided herein can be made individually or in any combination in the TadA reference sequence or another adenosine deaminase.

[0476] In some embodiments, the adenosine deaminase comprises a D108X mutation in the TadA reference sequence, or a corresponding mutation in another adenosine deaminase (e.g., ecTadA), where X indicates any amino acid other than the corresponding amino acid in the wild-type adenosine deaminase. In some embodiments, the adenosine deaminase comprises a D108G, D108N, D108V, D108A, or D108Y mutation, or a corresponding mutation in another adenosine deaminase.

[0477] In some embodiments, the adenosine deaminase comprises an A106X mutation in TadA reference sequence, or a corresponding mutation in another adenosine deaminase (e.g., ecTadA), where X indicates any amino acid other than the corresponding amino acid in the wild-type adenosine deaminase. In some embodiments, the adenosine deaminase comprises an A106V mutation in TadA reference sequence, or a corresponding mutation in another adenosine deaminase (e.g., wild-type TadA or ecTadA).

[0478] In some embodiments, the adenosine deaminase comprises a E155X mutation in TadA reference sequence, or a corresponding mutation in another adenosine deaminase (e.g., ecTadA), where the presence of X indicates any amino acid other than the corresponding amino acid in the wild-type adenosine deaminase. In some embodiments, the adenosine deaminase comprises a E155D, E155G, or E155V mutation in TadA reference sequence, or a corresponding mutation in another adenosine deaminase (e.g., ecTadA).

[0479] In some embodiments, the adenosine deaminase comprises a D147X mutation in TadA reference sequence, or a corresponding mutation in another adenosine deaminase (e.g., ecTadA), where the presence of X indicates any amino acid other than the corresponding amino acid in the wild-type adenosine deaminase. In some embodiments, the adenosine deaminase comprises a D147Y, mutation in TadA reference sequence, or a corresponding mutation in another adenosine deaminase (e.g., ecTadA).

[0480] In some embodiments, the adenosine deaminase comprises an A106X, E155X, or D147X, mutation in the TadA reference sequence, or a corresponding mutation in another adenosine deaminase (e.g., ecTadA), where X indicates any amino acid other than the corresponding amino acid in the wild-type adenosine deaminase. In some embodiments, the adenosine deaminase comprises an E155D, E155G, or E155V mutation. In some embodiments, the adenosine deaminase comprises a D147Y.

[0481] For example, an adenosine deaminase can contain a D108N, a A106V, a E155V, and/or a D147Y mutation in TadA reference sequence, or a corresponding mutation in another adenosine deaminase (e.g., ecTadA). In some embodiments, an adenosine deaminase comprises the following group of mutations (groups of mutations are separated by a “;”) in TadA reference sequence, or corresponding mutations in another adenosine deaminase (e.g., ecTadA): D108N and A106V; D108N and E155V; D108N and D147Y; A106V and E155V; A106V and D147Y; E155V and D147Y; D108N, A106V, and E155V; D108N, A106V, and D147Y; D108N, E155V, and D147Y; A106V, E155V, and D147Y; and D108N, A106V, E155V, and D147Y. It should be appreciated, however, that any combination of corresponding mutations provided herein can be made in an adenosine deaminase (e.g., ecTadA).

[0482] In some embodiments, the adenosine deaminase comprises one or more of a H8X, T17X, L18X, W23X, L34X, W45X, R51X, A56X, E59X, E85X, M94X, I95X, V102X, F104X, A106X, R107X, D108X, K110X, M118X, N127X, A138X, F149X, M151X, R153X, Q154X, I156X, and/or K157X mutation in TadA reference sequence, or one or more corresponding mutations in another adenosine deaminase (e.g., ecTadA), where the presence of X indicates any amino acid other than the corresponding amino acid in the wild-type adenosine deaminase. In some embodiments, the adenosine deaminase comprises one or more of H8Y, T17S, L18E, W23L, L34S, W45L, R51H, A56E, or A56S, E59G, E85K, or E85G, M94L, I95L, V102A, F104L, A106V, R107C, or R107H, or R107P, D108G, or D108N, or D108V, or D108A, or D108Y, K110I, M118K, N127S, A138V, F149Y, M151V, R153C, Q154L, I156D, and/or K157R mutation in TadA reference sequence, or one or more corresponding mutations in another adenosine deaminase (e.g., ecTadA).

[0483] In some embodiments, the adenosine deaminase comprises one or more of a H8X, D108X, and/or N127X mutation in TadA reference sequence, or one or more corresponding mutations in another adenosine deaminase (e.g., ecTadA), where X indicates the presence of any amino acid. In some embodiments, the adenosine deaminase comprises one or more of a H8Y, D108N, and/or N127S mutation in TadA reference sequence, or one or more corresponding mutations in another adenosine deaminase (e.g., ecTadA).

[0484] In some embodiments, the adenosine deaminase comprises one or more of H8X, R26X, M61X, L68X, M70X, A106X, D108X, A109X, N127X, D147X, R152X, Q154X, E155X, K161X, Q163X, and/or T166X mutation in TadA reference sequence, or one or more corresponding mutations in another adenosine deaminase (e.g., ecTadA), where X indicates the presence of any amino acid other than the corresponding amino acid in the wild-type adenosine deaminase. In some embodiments, the adenosine deaminase comprises one or more of H8Y, R26W, M61I, L68Q, M70V, A106T, D108N, A109T, N127S, D147Y, R152C, Q154H or Q154R, E155G or E155V or E155D, K161Q, Q163H, and/or T166P mutation in TadA reference sequence, or one or more corresponding mutations in another adenosine deaminase (e.g., ecTadA).

[0485] In some embodiments, the adenosine deaminase comprises one, two, three, four, five, or six mutations selected from the group consisting of H8X, D108X, N127X, D147X, R152X, and Q154X in TadA reference sequence, or a corresponding mutation or mutations in another adenosine deaminase (e.g., ecTadA), where X indicates the presence of any amino acid other than the corresponding amino acid in the wild-type adenosine deaminase. In some embodiments, the adenosine deaminase comprises one, two, three, four, five, six, seven, or eight mutations selected from the group consisting of H8X, M61X, M70X, D108X, N127X, Q154X, E155X, and Q163X in TadA reference sequence, or a corresponding mutation or mutations in another adenosine deaminase (e.g., ecTadA), where X indicates the presence of any amino acid other than the corresponding amino acid in the wild-type adenosine deaminase. In some embodiments, the adenosine deaminase comprises one, two, three, four, or five, mutations selected from the group consisting of H8X, D108X, N127X, E155X, and T166X in TadA reference sequence, or a corresponding mutation or mutations in another adenosine deaminase (e.g., ecTadA), where X indicates the presence of any amino acid other than the corresponding amino acid in the wild-type adenosine deaminase.

[0486] In some embodiments, the adenosine deaminase comprises one, two, three, four, five, or six mutations selected from the group consisting of H8X, A106X, D108X, mutation or mutations in another adenosine deaminase, where X indicates the presence of any amino acid other than the corresponding amino acid in the wild-type adenosine deaminase. In some embodiments, the adenosine deaminase comprises one, two, three, four, five, six, seven, or eight mutations selected from the group consisting of H8X, R26X, L68X, D108X, N127X, D147X, and E155X, or a corresponding mutation or mutations in another adenosine deaminase, where X indicates the presence of any amino acid other than the corresponding amino acid in the wild-type adenosine deaminase. In some embodiments, the adenosine deaminase comprises one, two, three, four, or five, mutations selected from the group consisting of H8X, D108X, A109X, N127X, and E155X in TadA reference sequence, or a corresponding mutation or mutations in another adenosine deaminase (e.g., ecTadA), where X indicates the presence of any amino acid other than the corresponding amino acid in the wild-type adenosine deaminase.

[0487] In some embodiments, the adenosine deaminase comprises one, two, three, four, five, or six mutations selected from the group consisting of H8Y, D108N, N127S, D147Y, R152C, and Q154H in TadA reference sequence, or a corresponding mutation or mutations in another adenosine deaminase (e.g., ecTadA). In some embodiments, the adenosine deaminase comprises one, two, three, four, five, six, seven, or eight mutations selected from the group consisting of H8Y, M61I, M70V, D108N, N127S, Q154R, E155G and Q163H in TadA reference sequence, or a corresponding mutation or mutations in another adenosine deaminase (e.g., ecTadA). In some embodiments, the adenosine deaminase comprises one, two, three, four, or five, mutations selected from the group consisting of H8Y, D108N, N127S, E155V, and T166P in TadA reference sequence, or a corresponding mutation or mutations in another adenosine deaminase (e.g., ecTadA). In some embodiments, the adenosine deaminase comprises one, two, three, four, five, or six mutations selected from the group consisting of H8Y, A106T, D108N, N127S, E155D, and K161Q in TadA reference sequence, or a corresponding mutation or mutations in another adenosine deaminase (e.g., ecTadA). In some embodiments, the adenosine deaminase comprises one, two, three, four, five, six, seven, or eight mutations selected from the group consisting of H8Y, R26W, L68Q, D108N, N127S, D147Y, and E155V in TadA reference sequence, or a corresponding mutation or mutations in another adenosine deaminase (e.g., ecTadA). In some embodiments, the adenosine deaminase comprises one, two, three, four, or five, mutations selected from the group consisting of H8Y, D108N, A109T, N127S, and E155G in TadA reference sequence, or a corresponding mutation or mutations in another adenosine deaminase (e.g., ecTadA).

[0488] Any of the mutations provided herein and any additional mutations (e.g., based on the ecTadA amino acid sequence) can be introduced into any other adenosine deaminases. Any of the mutations provided herein can be made individually or in any combination in TadA reference sequence or another adenosine deaminase (e.g., ecTadA).

[0489] Details of A to G nucleobase editing proteins are described in International PCT Application No. PCT/2017/045381 (WO2018/027078) and Gaudelli, N. M., et al., “Programmable base editing of A•T to G•C in genomic DNA without DNA cleavage” Nature, 551, 464-471 (2017), the entire contents of which are hereby incorporated by reference.

[0490] In some embodiments, the adenosine deaminase comprises one or more corresponding mutations in another adenosine deaminase (e.g., ecTadA). In some embodiments, the adenosine deaminase comprises a D108N, D108G, or D108V mutation in TadA reference sequence, or corresponding mutations in another adenosine deaminase (e.g., ecTadA). In some embodiments, the adenosine deaminase comprises a A106V and D108N mutation in TadA reference sequence, or corresponding mutations in another adenosine deaminase (e.g., ecTadA). In some embodiments, the adenosine deaminase comprises R107C and D108N mutations in TadA reference sequence, or corresponding mutations in another adenosine deaminase (e.g., ecTadA). In some embodiments, the adenosine deaminase comprises a H8Y, D108N, N127S, D147Y, and Q154H mutation in TadA reference sequence, or corresponding mutations in another adenosine deaminase (e.g., ecTadA). In some embodiments, the adenosine deaminase comprises a H8Y, D108N, N127S, D147Y, and E155V mutation in TadA reference sequence, or corresponding mutations in another adenosine deaminase (e.g., ecTadA). In some embodiments, the adenosine deaminase comprises a D108N, D147Y, and E155V mutation in TadA reference sequence, or corresponding mutations in another adenosine deaminase (e.g., ecTadA). In some embodiments, the adenosine deaminase comprises a H8Y, D108N, and N127S mutation in TadA reference sequence, or corresponding mutations in another adenosine deaminase (e.g., ecTadA). In some embodiments, the adenosine deaminase comprises a A106V, D108N, D147Y and E155V mutation in TadA reference sequence, or corresponding mutations in another adenosine deaminase (e.g., ecTadA).

[0491] In some embodiments, the adenosine deaminase comprises one or more of a S2X, H8X, I49X, L84X, H123X, N127X, I156X and/or K160X mutation in TadA reference sequence, or one or more corresponding mutations in another adenosine deaminase, where the presence of X indicates any amino acid other than the corresponding amino acid in the wild-type adenosine deaminase. In some embodiments, the adenosine deaminase comprises one or more of S2A, H8Y, I49F, L84F, H123Y, N127S, I156F and/or K160S mutation in TadA reference sequence, or one or more corresponding mutations in another adenosine deaminase (e.g., ecTadA).

[0492] In some embodiments, the adenosine deaminase comprises an L84X mutation adenosine deaminase, where X indicates any amino acid other than the corresponding amino acid in the wild-type adenosine deaminase. In some embodiments, the adenosine deaminase comprises an L84F mutation in TadA reference sequence, or a corresponding mutation in another adenosine deaminase (e.g., ecTadA).

[0493] In some embodiments, the adenosine deaminase comprises an H123X mutation in TadA reference sequence, or a corresponding mutation in another adenosine deaminase (e.g., ecTadA), where X indicates any amino acid other than the corresponding amino acid in the wild-type adenosine deaminase. In some embodiments, the adenosine deaminase comprises an H123Y mutation in TadA reference sequence, or a corresponding mutation in another adenosine deaminase (e.g., ecTadA).

[0494] In some embodiments, the adenosine deaminase comprises an I156X mutation in TadA reference sequence, or a corresponding mutation in another adenosine deaminase (e.g., ecTadA), where X indicates any amino acid other than the corresponding amino acid in the wild-type adenosine deaminase. In some embodiments, the adenosine deaminase comprises an I156F mutation in TadA reference sequence, or a corresponding mutation in another adenosine deaminase (e.g., ecTadA).

[0495] In some embodiments, the adenosine deaminase comprises one, two, three, four, five, six, or seven mutations selected from the group consisting of L84X, A106X, D108X, H123X, D147X, E155X, and I156X in TadA reference sequence, or a corresponding mutation or mutations in another adenosine deaminase (e.g., ecTadA), where X indicates the presence of any amino acid other than the corresponding amino acid in the wild-type adenosine deaminase. In some embodiments, the adenosine deaminase comprises one, two, three, four, five, or six mutations selected from the group consisting of S2X, I49X, A106X, D108X, D147X, and E155X in TadA reference sequence, or a corresponding mutation or mutations in another adenosine deaminase (e.g., ecTadA), where X indicates the presence of any amino acid other than the corresponding amino acid in the wild-type adenosine deaminase. In some embodiments, the adenosine deaminase comprises one, two, three, four, or five, mutations selected from the group consisting of H8X, A106X, D108X, N127X, and K160X in TadA reference sequence, or a corresponding mutation or mutations in another adenosine deaminase (e.g., ecTadA), where X indicates the presence of any amino acid other than the corresponding amino acid in the wild-type adenosine deaminase.

[0496] In some embodiments, the adenosine deaminase comprises one, two, three, four, five, six, or seven mutations selected from the group consisting of L84F, A106V, D108N, H123Y, D147Y, E155V, and I156F in TadA reference sequence, or a corresponding mutation or mutations in another adenosine deaminase (e.g., ecTadA). In some embodiments, the adenosine deaminase comprises one, two, three, four, five, or six mutations selected from the group consisting of S2A, I49F, A106V, D108N, D147Y, and E155V in TadA reference sequence.

[0497] In some embodiments, the adenosine deaminase comprises one, two, three, four, or five, mutations selected from the group consisting of H8Y, A106T, D108N, N127S, and K160S in TadA reference sequence, or a corresponding mutation or mutations in another adenosine deaminase (e.g., ecTadA).

[0498] In some embodiments, the adenosine deaminase comprises one or more of a E25X, R26X, R107X, A142X, and/or A143X mutation in TadA reference sequence, or one or more corresponding mutations in another adenosine deaminase (e.g., ecTadA), where the presence of X indicates any amino acid other than the corresponding amino acid in the wild-type adenosine deaminase. In some embodiments, the adenosine deaminase comprises one or more of E25M, E25D, E25A, E25R, E25V, E25S, E25Y, R26G, R26N, R26Q, R26C, R26L, R26K, R107P, R107K, R107A, R107N, R107W, R107H, R107S, A142N, A142D, A142G, A143D, A143G, A143E, A143L, A143W, A143M, A143S, A143Q and/or A143R mutation in TadA reference sequence, or one or more corresponding mutations in another adenosine deaminase (e.g., ecTadA). In some embodiments, the adenosine deaminase comprises one or more of the mutations described herein corresponding to TadA reference sequence, or one or more corresponding mutations in another adenosine deaminase (e.g., ecTadA).

[0499] In some embodiments, the adenosine deaminase comprises an E25X mutation in TadA reference sequence, or a corresponding mutation in another adenosine deaminase (e.g., ecTadA), where X indicates any amino acid other than the corresponding amino acid in the wild-type adenosine deaminase. In some embodiments, the adenosine deaminase comprises an E25M, E25D, E25A, E25R, E25V, E25S, or E25Y mutation in TadA reference sequence, or a corresponding mutation in another adenosine deaminase (e.g., ecTadA).

[0500] In some embodiments, the adenosine deaminase comprises an R26X mutation in TadA reference sequence, or a corresponding mutation in another adenosine deaminase (e.g., ecTadA), where X indicates any amino acid other than the corresponding amino acid in the wild-type adenosine deaminase. In some embodiments, the adenosine deaminase comprises R26G, R26N, R26Q, R26C, R26L, or R26K mutation in TadA reference sequence, or a corresponding mutation in another adenosine deaminase (e.g., ecTadA).

[0501] In some embodiments, the adenosine deaminase comprises an R107X mutation in TadA reference sequence, or a corresponding mutation in another adenosine deaminase (e.g., ecTadA), where X indicates any amino acid other than the corresponding amino acid in the wild-type adenosine deaminase. In some embodiments, the adenosine deaminase comprises an R107P, R107K, R107A, R107N, R107W, R107H, or R107S mutation in TadA reference sequence, or a corresponding mutation in another adenosine deaminase (e.g., ecTadA).

[0502] In some embodiments, the adenosine deaminase comprises an A142X mutation in TadA reference sequence, or a corresponding mutation in another adenosine deaminase (e.g., ecTadA), where X indicates any amino acid other than the corresponding amino acid in the wild-type adenosine deaminase. In some embodiments, the adenosine deaminase comprises an A142N, A142D, A142G, mutation in TadA reference sequence, or a corresponding mutation in another adenosine deaminase (e.g., ecTadA).

[0503] In some embodiments, the adenosine deaminase comprises an A143X mutation in TadA reference sequence, or a corresponding mutation in another adenosine deaminase (e.g., ecTadA), where X indicates any amino acid other than the corresponding amino acid in the wild-type adenosine deaminase. In some embodiments, the adenosine deaminase comprises an A143D, A143G, A143E, A143L, A143W, A143M, A143S, A143Q and/or A143R mutation in TadA reference sequence, or a corresponding mutation in another adenosine deaminase (e.g., ecTadA).

[0504] In some embodiments, the adenosine deaminase comprises one or more of a H36X, N37X, P48X, I49X, R51X, M70X, N72X, D77X, E134X, S146X, Q154X, K157X, and/or K161X mutation in TadA reference sequence, or one or more corresponding mutations in another adenosine deaminase (e.g., ecTadA), where the presence of X indicates any amino acid other than the corresponding amino acid in the wild-type adenosine deaminase. In some embodiments, the adenosine deaminase comprises one or more of H36L, N37T, N37S, P48T, P48L, I49V, R51H, R51L, M70L, N72S, D77G, E134G, S146R, S146C, Q154H, K157N, and/or K161T mutation in TadA reference sequence, or one or more corresponding mutations in another adenosine deaminase (e.g., ecTadA).

[0505] In some embodiments, the adenosine deaminase comprises an H36X mutation in TadA reference sequence, or a corresponding mutation in another adenosine deaminase (e.g., ecTadA), where X indicates any amino acid other than the corresponding amino acid in the wild-type adenosine deaminase. In some embodiments, the adenosine deaminase comprises an H36L mutation in TadA reference sequence, or a corresponding mutation in another adenosine deaminase (e.g., ecTadA).

[0506] In some embodiments, the adenosine deaminase comprises an N37X mutation in TadA reference sequence, or a corresponding mutation in another adenosine deaminase (e.g., ecTadA), where X indicates any amino acid other than the corresponding amino acid in the wild-type adenosine deaminase. In some embodiments, the adenosine deaminase comprises an N37T, or N37S mutation in TadA reference sequence, or a corresponding mutation in another adenosine deaminase (e.g., ecTadA).

[0507] In some embodiments, the adenosine deaminase comprises an P48X mutation in TadA reference sequence, or a corresponding mutation in another adenosine deaminase (e.g., ecTadA), where X indicates any amino acid other than the corresponding amino acid in the wild-type adenosine deaminase. In some embodiments, the adenosine deaminase comprises an P48T, or P48L mutation in TadA reference sequence, or a corresponding mutation in another adenosine deaminase (e.g., ecTadA).

[0508] In some embodiments, the adenosine deaminase comprises an R51X mutation in TadA reference sequence, or a corresponding mutation in another adenosine deaminase, where X indicates any amino acid other than the corresponding amino acid in the wild-type adenosine deaminase. In some embodiments, the adenosine deaminase comprises an R51H, or R51L mutation in TadA reference sequence, or a corresponding mutation in another adenosine deaminase (e.g., ecTadA).

[0509] In some embodiments, the adenosine deaminase comprises an S146X mutation in TadA reference sequence, or a corresponding mutation in another adenosine deaminase (e.g., ecTadA), where X indicates any amino acid other than the corresponding amino acid in the wild-type adenosine deaminase. In some embodiments, the adenosine deaminase comprises an S146R, or S146C mutation in TadA reference sequence, or a corresponding mutation in another adenosine deaminase (e.g., ecTadA).

[0510] In some embodiments, the adenosine deaminase comprises an K157X mutation in TadA reference sequence, or a corresponding mutation in another adenosine deaminase (e.g., ecTadA), where X indicates any amino acid other than the corresponding amino acid in the wild-type adenosine deaminase. In some embodiments, the adenosine deaminase comprises a K157N mutation in TadA reference sequence, or a corresponding mutation in another adenosine deaminase (e.g., ecTadA).

[0511] In some embodiments, the adenosine deaminase comprises an P48X mutation in TadA reference sequence, or a corresponding mutation in another adenosine deaminase (e.g., ecTadA), where X indicates any amino acid other than the corresponding amino acid in the wild-type adenosine deaminase. In some embodiments, the adenosine deaminase comprises a P48S, P48T, or P48A mutation in TadA reference sequence, or a corresponding mutation in another adenosine deaminase (e.g., ecTadA).

[0512] In some embodiments, the adenosine deaminase comprises an A142X mutation in TadA reference sequence, or a corresponding mutation in another adenosine deaminase (e.g., ecTadA), where X indicates any amino acid other than the corresponding amino acid in the wild-type adenosine deaminase. In some embodiments, the adenosine deaminase comprises a A142N mutation in TadA reference sequence, or a corresponding mutation in another adenosine deaminase (e.g., ecTadA).

[0513] In some embodiments, the adenosine deaminase comprises an W23X mutation in TadA reference sequence, or a corresponding mutation in another adenosine deaminase (e.g., ecTadA), where X indicates any amino acid other than the corresponding amino acid in the wild-type adenosine deaminase. In some embodiments, the adenosine deaminase comprises a W23R, or W23L mutation in TadA reference sequence, or a corresponding mutation in another adenosine deaminase (e.g., ecTadA).

[0514] In some embodiments, the adenosine deaminase comprises an R152X mutation in TadA reference sequence, or a corresponding mutation in another adenosine deaminase (e.g., ecTadA), where X indicates any amino acid other than the corresponding amino acid in the wild-type adenosine deaminase. In some embodiments, the adenosine deaminase comprises a R152P, or R52H mutation in TadA reference sequence, or a corresponding mutation in another adenosine deaminase (e.g., ecTadA).

[0515] In one embodiment, the adenosine deaminase may comprise the mutations H36L, R51L, L84F, A106V, D108N, H123Y, S146C, D147Y, E155V, I156F, and K157N. In some embodiments, the adenosine deaminase comprises the following combination of mutations relative to TadA reference sequence, where each mutation of a combination is separated by a “_” and each combination of mutations is between parentheses:

### (A106V_D108N),

### (R107C_D108N),

### (H8Y_D108N_N-127S_D147Y_Q154H),

### (H8Y_D108N_N127S_D147Y_E155V),

### (D108N_D147Y_E155V),

### (H8Y_D108N_N127S),

### (H8Y_D108N_N_127 S_D147Y_Q154H),

### (A106V_D108N_D147Y_E155V),

### (D108Q_D147Y_E155V),

### (D108M_D147Y_E155V),

### (D108L_D147Y_E155V),

### (D108K_D147Y_E155V),

### (D108I_D147Y_E155V),

### (D108F_D147Y_E155V),

### (A106V_D108N_D147Y),

### (A106V_D108M_D147Y_E155V),

### (E59A_A106V_D108N_D147Y_E155V),

[0516] (E59A cat dead_A106V_D108N_D147Y_E155V),

### (L84F_A106V_D108N_H123Y_D147Y_E155V_1156 Y),

### (L84F_A106V_D108N_H123Y_D147Y_E155V_I156F),

### (D103A_D104N),

### (G22P_D103A_D104N),

### (D103A_D104N_S138A),

### (R26G_L84F_A106V_R107H_D108N_H123Y_A142N_A143D_D147Y_E155V_I156F),

### (E25G_R26G_L84F_A106V_R107H_D108N_H123Y_A142N_A143D_D147Y_E155V_I156F), (E25D_R26G_L84F_A106V_R107K_D108N_H123Y_A142N_A143G_D147Y_E155V_I156F),

### (R26Q_L84F_A106V_D108N_H123Y_A142N_D147Y_E155V_I156F),

### (E25M_R26G_L84F_A106V_R107P_D108N_H123Y_A142N_A143D_D147Y_E155V I156F),

### (R26C_L84F_A106V_R107H_D108N_H123Y_A142N_D147Y_E155V_I156F),

### (L84F_A106V_D108N_H123Y_A142N_A143L_D147Y_E155V_I156F),

### (R26G_L84F_A106V_D108N_H123Y_A142N_D147Y_E155V_I156F),

### (E25A_R26G_L84F_A106V_R107N_D108N_H123Y_A142N_A143E_D147Y_E155V I156F),

### (R26G_L84F_A106V_R107H_D108N_H123Y_A142N_A143D_D147Y_E155V_I156F),

### (A106V_D108N_A142N_D147Y_E155V),

### (R26G_A106V_D108N_A142N_D147Y_E155V),

### (E25D_R26G_A106V_R107K_D108N_A142N_A143G_D147Y_E155V),

### (R26G_A106V_D108N_R107H_A142N_A143D_D147Y_E155V),

### (E25D_R26G_A106V_D108N_A142N_D147Y_E155V),

### (A106V_R107K_D108N_A142N_D147Y_E155V),

### (A106V_D108N_A142N_A143G_D147Y_E155V),

### (A106V_D108N_A142N_A143L_D147Y_E155V),

### (H36L_R51L_L84F_A106V_D108N_H123Y_S146C_D147Y_E155V_I156F_K157N),

### (N37T_P48T_M70L_L84F_A106V_D108N_H123Y_D147Y_149V_E155V_I156F),

### (N37S_L84F_A106V_D108N_H123Y_D147Y_E155V_I156F_K161T),

### (H36L_L84F_A106V_D108N_H123Y_D147Y_Q154H_E155V_I156F),

### (N72S_L84F_A106V_D108N_H123Y_S146R_D147Y_E155V_I156F),

### (H36L_P48L_L84F_A106V_D108N_H123Y_E134G_D147Y_E155V_I156F),

### (H36L_L84F_A106V_D108N_H123Y_D147Y_E155V_I156F_K157N),

### (H36L_L84F_A106V_D108N_H123Y_S146C_D147Y_E155V_I156F),

### (L84F_A106V_D108N_H123Y_S146R_D147Y_E155V_I156F_K161T),

### (N37S_R51H_D77G_L84F_A106V_D108N_H123Y_D147Y_E155V_I156F),

### (R51L_L84F_A106V_D108N_H123Y_D147Y_E155V_I156F_K157N),

### (D24G_Q71R_L84F_H96L_A106V_D108N_H123Y_D147Y_E155V_I156F_K160E),

### (H36L_G67V_L84F_A106V_D108N_H123Y_S146T_D147Y_E155V_I156F),

### (Q71L_L84F_A106V_D108N_H123Y_L137M_A143E_D147Y_E155V_I156F),

### (E25G_L84F_A106V_D108N_H123Y_D147Y_E155V_I156F_Q159L),

### (L84F_A91T_F104I_A106V_D108N_H123Y_D147Y_E155V_I156F),

### (N72D_L84F_A106V_D108N_H123Y_G125A_D147Y_E155V_I156F),

### (P48S_L84F_S97C_A106V_D108N_H123Y_D147Y_E155V_I156F),

### (W23G_L84F_A106V_D108N_H123Y_D147Y_E155V_I156F),

### (D24G_P48L_Q71R_L84F_A106V_D108N_H123Y_D147Y_E155V_I156F_Q159L),

### (L84F_A106V_D108N_H123Y_A142N_D147Y_E155V_I156F),

### (H36L_R51L_L84F_A106V_D108N_H123Y_A142N_S146C_D147Y_E155V_I156F_K157N), (N37S_L84F_A106V_D108N_H123Y_A142N_D147Y_E155V_I156F_K161T),

### (L84F_A106V_D108N_D147Y_E155V_I156F),

### (R51L_L84F_A106V_D108N_H123Y_S146C_D147Y_E155V_I156F_K157N_K161T),

### (L84F_A106V_D108N_H123Y_S146C_D147Y_E155V_I156F_K161T),

### (L84F_A106V_D108N_H123Y_S146C_D147Y_E155V_I156F_K157N_K160E_K161T),

### (L84F_A106V_D108N_H123Y_S146C_D147Y_E155V_I156F_K157N_K160E),

### (R74Q_L84F_A106V_D108N_H123Y_D147Y_E155V_I156F),

### (R74A_L84F_A106V_D108N_H123Y_D147Y_E155V_I156F),

### (L84F_A106V_D108N_H123Y_D147Y_E155V_I156F),

### (R74Q_L84F_A106V_D108N_H123Y_D147Y_E155V_I156F),

### (L84F_R98Q_A106V_D108N_H123Y_D147Y_E155V_I156F),

### (L84F_A106V_D108N_H123Y_R129Q_D147Y_E155V_I156F),

### (P48S_L84F_A106V_D108N_H123Y_A142N_D147Y_E155V_I156F),

### (P48S_A142N),

### (P48T_149V_L84F_A106V_D108N_H123Y_A142N_D147Y_E155V_I156F_L157N),

### (P48T_149V_A142N),

### (H36L_P48S_R51L_L84F_A106V_D108N_H123Y_S146C_D147Y_E155V_I156F_K157N),

### (H36L_P48S_R51L_L84F_A106V_D108N_H123Y_S146C_A142N_D147Y_E155V_I156F

### (H36L_P48T_149V_R51L_L84F_A106V_D108N_H123Y_S146C_D147Y_E155V_I156F_K157N),

### (H36L_P48T_149V_R51L_L84F_A106V_D108N_H123Y_A142N_S146C_D147Y_E155V_I156F_K157N),

### (H36L_P48A_R51L_L84F_A106V_D108N_H123Y_S146C_D147Y_E155V_I156F_K157N),

### (H36L_P48A_R51L_L84F_A106V_D108N_H123Y_A142N_S146C_D147Y_E155V_I156F_K157N),

### (H36L_P48A_R51L_L84F_A106V_D108N_H123Y_S146C_A142N_D147Y_E155V_I156F_K157N),

### (W23L_H36L_P48A_R51L_L84F_A106V_D108N_H123Y_S146C_D147Y_E155V_I156F_K157N),

### (W23R_H36L_P48A_R51L_L84F_A106V_D108N_H123Y_S146C_D147Y_E155V_I156F_K157N),

### (W23L_H36L_P48A_R51L_L84F_A106V_D108N_H123Y_S146R_D147Y_E155V_I156F_K161T),

### (H36L_P48A_R51L_L84F_A106V_D108N_H123Y_S146C_D147Y_R152H_E155V_I156F_K157N),

### (H36L_P48A_R51L_L84F_A106V_D108N_H123Y_S146C_D147Y_R152P_E155V_I156F_K157N),

### (W23L_H36L_P48A_R51L_L84F_A106V_D108N_H123Y_S146C_D147Y_R152P_E155V_I156F_K157N),

### (W23L_H36L_P48A_R51L_L84F_A106V_D108N_H123Y_A142A_S146C_D147Y_E155V_I156F_K157N),

### (W23L_H36L_P48A_R51L_L84F_A106V_D108N_H123Y_A142A_S146C_D147Y_R152P_E155V_I156F_K157N),

### (W23L_H36L_P48A_R51L_L84F_A106V_D108N_H123Y_S146R_D147Y_E155V_I156F_K161T),

### (W23R_H36L_P48A_R51L_L84F_A106V_D108N_H123Y_S146C_D147Y_R152P_E155V_I156F_K157N),

### (H36L_P48A_R51L_L84F_A106V_D108N_H123Y_A142N_S146C_D147Y_R152P_E155V_I156F_K157N).

[0517] In certain embodiments, the fusion proteins provided herein comprise one or more features that improve the base editing activity of the fusion proteins. For example, any of the fusion proteins provided herein may comprise a Cas9 domain that has reduced nuclease activity. In some embodiments, any of the fusion proteins provided herein may have a Cas9 domain that does not have nuclease activity (dCas9), or a Cas9 domain that cuts one strand of a duplexed DNA molecule, referred to as a Cas9 nickase (nCas9).

[0518] In some embodiments, the adenosine deaminase is TadA*7.10. In some embodiments, TadA*7.10 comprises at least one alteration. In particular embodiments, TadA*7.10 comprises one or more of the following alterations: Y147T, Y147R, Q154S, Y123H, V82S, T166R, and Q154R. The alteration Y123H is also referred to herein as H123H (the alteration H123Y in TadA*7.10 reverted back to Y123H (wt)). In other embodiments, the TadA*7.10 comprises a combination of alterations selected from the group of: Y147T+Q154R; Y147T+Q154S; Y147R+Q154S; V82S+Q154S; V82S+Y147R; V82S+Q154R; V82S+Y123H; I76Y+V82S; V82S+Y123H+Y147T; V82S+Y123H+Y147R; V82S+Y123H+Q154R; Y147R+Q154R+Y123H; Y147R+Q154R+I76Y; Y147R+Q154R+T166R; Y123H+Y147R+Q154R+I76Y; V82S+Y123H+Y147R+Q154R; and I76Y+V82S+Y123H+Y147R+Q154R. In particular embodiments, an adenosine deaminase variant comprises a deletion of the C terminus beginning at residue 149, 150, 151, 152, 153, 154, 155, 156, and 157, relative to TadA*7.10, the TadA reference sequence, or a corresponding mutation in another TadA.

[0519] In other embodiments, a base editor of the disclosure is a monomer comprising an adenosine deaminase variant (e.g., TadA*8) comprising one or more of the following alterations: Y147T, Y147R, Q154S, Y123H, V82S, T166R, and/or Q154R, relative to TadA*7.10, the TadA reference sequence, or a corresponding mutation in another TadA. In other embodiments, the adenosine deaminase variant (TadA*8) is a monomer comprising a combination of alterations selected from the group of: Y147T+Q154R; Y147T+Q154S; Y147R+Q154S; V82S+Q154S; V82S+Y147R; V82S+Q154R; V82S+Y123H; I76Y+V82S; V82S+Y123H+Y147T; V82S+Y123H+Y147R; V82S+Y123H+Q154R; Y147R+Q154R+Y123H; Y147R+Q154R+I76Y; Y147R+Q154R+T166R; Y123H+Y147R+Q154R+I76Y; V82S+Y123H+Y147R+Q154R; and I76Y+V82S+Y123H+Y147R+Q154R, relative to TadA*7.10, the TadA reference sequence, or a corresponding mutation in another TadA.

[0520] In other embodiments, a base editor is a heterodimer comprising a wild-type adenosine deaminase and an adenosine deaminase variant (e.g., TadA*8) comprising one or more of the following alterations Y147T, Y147R, Q154S, Y123H, V82S, T166R, and/or Q154R, relative to TadA*7.10, the TadA reference sequence, or a corresponding mutation in another TadA. In other embodiments, the base editor is a heterodimer comprising a wild-type adenosine deaminase and an adenosine deaminase variant domain (e.g., TadA*8) comprising a combination of alterations selected from the group of: Y147T+Q154R; Y147T+Q154S; Y147R+Q154S; V82S+Q154S; V82S+Y147R; V82S+Q154R; V82S+Y123H; I76Y+V82S; V82S+Y123H+Y147T; V82S+Y123H+Y147R; V82S+Y123H+Q154R; Y147R+Q154R+Y123H; Y147R+Q154R+I76Y; Y147R+Q154R+T166R; Y123H+Y147R+Q154R+I76Y; V82S+Y123H+Y147R+Q154R; and I76Y+V82S+Y123H+Y147R+Q154R, relative to TadA*7.10, the TadA reference sequence, or a corresponding mutation in another TadA.

[0521] In other embodiments, a base editor is a heterodimer comprising a TadA*7.10 domain and an adenosine deaminase variant (e.g., TadA*8) comprising one or more of the following alterations Y147T, Y147R, Q154S, Y123H, V82S, T166R, and/or Q154R, relative to TadA*7.10, the TadA reference sequence, or a corresponding mutation in another TadA. In other embodiments, the base editor is a heterodimer comprising a TadA*7.10 domain and an adenosine deaminase variant domain (e.g., TadA*8) comprising a combination of alterations selected from the group of: Y147T+Q154R; Y147T+Q154S; Y147R+Q154S; V82S+Q154S; V82S+Y147R; V82S+Q154R; V82S+Y123H; I76Y+V82S; V82S+Y123H+Y147T; V82S+Y123H+Y147R; V82S+Y123H+Q154R; Y147R+Q154R+Y123H; Y147R+Q154R+I76Y; Y147R+Q154R+T166R; Y123H+Y147R+Q154R+I76Y; V82S+Y123H+Y147R+Q154R; and I76Y+V82S+Y123H+Y147R+Q154R, relative to TadA*7.10, the TadA reference sequence, or a corresponding mutation in another TadA.

[0522] In one embodiment, an adenosine deaminase is a TadA*8 that comprises or consists essentially of the following sequence or a fragment thereof having adenosine deaminase activity:

MSEVEFSHEYWMRHALTLAKRARDEREVPVGAVLVLNNRVIGEGWNRAIG
LHDPTAHAEIMALRQGGLVMQNYRLIDATLYVTFEPCVMCAGAMIHSRIG
RVVFGVRNAKTGAAGSLMDVLHYPGMNHRVEITEGILADECAALLCTFFR
MPRQVFNAQKKAQSSTD

[0523] In some embodiments, the TadA*8 is a truncated. In some embodiments, the truncated TadA*8 is missing 1, 2, 3, 4, 5, 6, 7, 8, 9, 10, 11, 12, 13, 14, 15, 6, 17, 18, 19, or 20 N-terminal amino acid residues relative to the full length TadA*8. In some embodiments, the truncated TadA*8 is missing 1, 2, 3, 4, 5, 6, 7, 8, 9, 10, 11, 12, 13, 14, 15, 6, 17, 18, 19, or 20 C-terminal amino acid residues relative to the full length TadA*8. In some embodiments the adenosine deaminase variant is a full-length TadA*8.

[0524] In some embodiments the TadA*8 is TadA*8.1, TadA*8.2, TadA*8.3, TadA*8.4, TadA*8.5, TadA*8.6, TadA*8.7, TadA*8.8, TadA*8.9, TadA*8.10, TadA*8.11, TadA*8.12, TadA*8.13, TadA*8.14, TadA*8.15, TadA*8.16, TadA*8.17, TadA*8.18, TadA*8.19, TadA*8.20, TadA*8.21, TadA*8.22, TadA*8.23, or TadA*8.24.

[0525] In other embodiments, a base editor of the disclosure is a monomer comprising an adenosine deaminase variant (e.g., TadA*8) comprising one or more of the following alterations: R26C, V88A, A109S, T111R, D119N, H122N, Y147D, F149Y, T166I and/or D167N, relative to TadA*7.10, the TadA reference sequence, or a corresponding mutation in another TadA. In other embodiments, the adenosine deaminase variant (TadA*8) is a monomer comprising a combination of alterations selected from the group of: R26C+A109S+T111R+D119N+H122N+Y147D+F149Y+T166I+D167N; V88A+A109S+T111R+D119N+H122N+F149Y+T166I+D167N; R26C+A109S+T111R+D119N+H122N+F149Y+11661+D167N; V88A+T111R+D119N+F149Y; and A109S+T111R+D119N+H122N+Y147D+F149Y+11661+D167N, relative to TadA*7.10, the TadA reference sequence, or a corresponding mutation in another TadA.

[0526] In other embodiments, a base editor is a heterodimer comprising a wild-type adenosine deaminase and an adenosine deaminase variant (e.g., TadA*8) comprising one or more of the following alterations R26C, V88A, A109S, T111R, D119N, H122N, Y147D, F149Y, T166I and/or D167N, relative to TadA*7.10, the TadA reference sequence, or a corresponding mutation in another TadA. In other embodiments, the base editor is a heterodimer comprising a wild-type adenosine deaminase and an adenosine deaminase variant domain (e.g., TadA*8) comprising a combination of alterations selected from the group of: R26C+A109S+T111R+D119N+H122N+Y147D+F149Y+T166I+D167N; V88A+A109S+T111R+D119N+H122N+F149Y+T166I+D167N; R26C+A109S+T111R+D119N+H122N+F149Y+T166I+D167N; V88A+T111R+D119N+F149Y; and A109S+T111R+D119N+H122N+Y147D+F149Y+T166I+D167N, relative to TadA*7.10, the TadA reference sequence, or a corresponding mutation in another TadA.

[0527] In other embodiments, a base editor is a heterodimer comprising a TadA*7.10 domain and an adenosine deaminase variant (e.g., TadA*8) comprising one or more of the following alterations R26C, V88A, A109S, T111R, D119N, H122N, Y147D, F149Y, T166I and/or D167N, relative to TadA*7.10, the TadA reference sequence, or a corresponding mutation in another TadA. In other embodiments, the base editor is a heterodimer comprising a TadA*7.10 domain and an adenosine deaminase variant domain (e.g., TadA*8) comprising a combination of alterations selected from the group of: R26C+A109S+T111R+D119N+H122N+Y147D+F149Y+T166I+D167N; V88A+A109S+T111R+D119N+H122N+F149Y+T166I+D167N; R26C+A109S+T111R+D119N+H122N+F149Y+T166I+D167N; V88A+T111R+D119N+F149Y; and A109S+T111R+D119N+H122N+Y147D+F149Y+T166I+D167N, relative to TadA*7.10, the TadA reference sequence, or a corresponding mutation in another TadA.

[0528] In some embodiments, the TadA*8 is a variant as shown in Table 8. Table 8 shows certain amino acid position numbers in the TadA amino acid sequence and the amino acids present in those positions in the TadA-7.10 adenosine deaminase. Table 8 also shows amino acid changes in TadA variants relative to TadA-7.10 following phage-assisted non-continuous evolution (PANCE) and phage-assisted continuous evolution (PACE), as described in M. Richter et al., 2020, Nature Biotechnology, doi.org/10.1038/s41587-020-0453-z, the entire contents of which are incorporated by reference herein. In some embodiments, the TadA*8 is TadA*8a, TadA*8b, TadA*8c, TadA*8d, or TadA*8e. In some embodiments, the TadA*8 is TadA*8e.

TABLE 8
Additional TadA*8 Variants

| | | TadA amino acid number | | | | | | | | | |
|---|---|---|---|---|---|---|---|---|---|---|---|
| | TadA | 26 | 88 | 109 | 111 | 119 | 122 | 147 | 149 | 166 | 167 |
| | TadA-7.10 | R | V | A | T | D | H | Y | F | T | D |
| PANCE 1 | | | | | R | | | | | | |
| PANCE 2 | | | | S/T | R | | | | | | |
| | TadA-8a | C | | S | R | N | N | D | Y | I | N |
| | TadA-8b | | A | S | R | N | N | | Y | I | N |
| PACE | TadA-8c | C | | S | R | N | N | | Y | I | N |
| | TadA-8d | | A | | R | N | | | Y | | |
| | TadA-8e | | | S | R | N | N | D | Y | I | N |

[0529] In one embodiment, a fusion protein of the disclosure comprises a wild-type TadA is linked to an adenosine deaminase variant described herein (e.g., TadA*8), which is linked to Cas9 nickase. In particular embodiments, the fusion proteins comprise a single TadA*8 domain (e.g., provided as a monomer). In other embodiments, the base editor comprises TadA*8 and TadA(wt), which are capable of forming heterodimers. Exemplary sequences follow:

TadA(wt) or “the TadA reference sequence”:
MSEVEFSHEYWMRHALTLAKRAWDEREVPVGAVLVHNNRVIGEGWNRPIG
RHDPTAHAEIMALRQGGLVMQNYRLIDATLYVTLEPCVMCAGAMIHSRIG
RVVFGARDAKTGAAGSLMDVLHHPGMNHRVEITEGILADECAALLSDFFR
MRRQEIKAQKKAQSSTD
TadA*7.10:
MSEVEFSHEYWMRHALTLAKRARDEREVPVGAVLVLNNRVIGEGWNRAIG
LHDPTAHAEIMALRQGGLVMQNYRLIDATLYVTFEPCVMCAGAMIHSRIG
RVVFGVRNAKTGAAGSLMDVLHYPGMNHRVEITEGILADECAALLCYFFR
MPRQVFNAQKKAQSSTD
TadA*8:
MSEVEFSHEYWMRHALTLAKRARDEREVPVGAVLVLNNRVIGEGWNRAIG
LHDPTAHAEIMALRQGGLVMQNYRLIDATLYVTFEPCVMCAGAMIHSRIG
RVVFGVRNAKTGAAGSLMDVLHYPGMNHRVEITEGILADECAALLCTFFR
MPRQVFNAQKKAQSSTD.

[0530] In some embodiments, the adenosine deaminase comprises an amino acid sequence that is at least 60%, at least 65%, at least 70%, at least 75%, at least 80%, at least 85%, at least 90%, at least 95%, at least 96%, at least 97%, at least 98%, at least 99%, or at least 99.5% identical to any one of the amino acid sequences set forth in any of the adenosine deaminases provided herein. It should be appreciated that adenosine deaminases provided herein may include one or more mutations (e.g., any of the mutations provided herein). The disclosure provides any deaminase domains with a certain percent identity plus any of the mutations or combinations thereof described herein. In some embodiments, the adenosine deaminase comprises an amino acid sequence that has 1, 2, 3, 4, 5, 6, 7, 8, 9, 10, 11, 12, 13, 14, 15, 16, 17, 18, 19, 20, 21, 22, 21, 24, 25, 26, 27, 28, 29, 30, 31, 32, 33, 34, 35, 36, 37, 38, 39, 40, 41, 42, 43, 44, 45, 46, 47, 48, 49, 50, or more mutations compared to a reference sequence, or any of the adenosine deaminases provided herein. In some embodiments, the adenosine deaminase comprises an amino acid sequence that has at least 5, at least 10, at least 15, at least 20, at least 25, at least 30, at least 35, at least 40, at least 45, at least 50, at least 60, at least 70, at least 80, at least 90, at least 100, at least 110, at least 120, at least 130, at least 140, at least 150, at least 160, or at least 170 identical contiguous amino acid residues as compared to any one of the amino acid sequences known in the art or described herein.

[0531] In particular embodiments, a TadA*8 comprises one or more mutations at any of the following positions shown in bold. In other embodiments, a TadA*8 comprises one or more mutations at any of the positions shown with underlining:

| | |
|---|---|
| MSEVEFSHEY WMRHALTLAK RARDEREVPV GAVLVLNNRV IGEGWNRAIG | 50 |
| LHDPTAHAEI MALRQGGLVM QNYRLIDATL Y [symbol] TFEPCVMC AGAMIHSRIG | 100 |
| RVVFGVRNAK TGAAGSLMDV LH [symbol] PGMNHRV EITEGILADE CAALLC [symbol] FFR | 150 |
| MPR [symbol] VFNAQK KAQSS [symbol] D | |

[0532] For example, the TadA*8 comprises alterations at amino acid position 82 and/or 166 (e.g., V82S, T166R) alone or in combination with any one or more of the following Y147T, Y147R, Q154S, Y123H, and/or Q154R, relative to TadA*7.10, the TadA reference sequence, or a corresponding mutation in another TadA. In particular embodiments, a combination of alterations is selected from the group of: Y147T+Q154R; Y147T+Q154S; Y147R+Q154S; V82S+Q154S; V82S+Y147R; V82S+Q154R; V82S+Y123H; I76Y+V82S; V82S+Y123H+Y147T; V82S+Y123H+Y147R; V82S+Y123H+Q154R; Y147R+Q154R+Y123H; Y147R+Q154R+I76Y; Y147R+Q154R+T166R; Y123H+Y147R+Q154R+I76Y; V82S+Y123H+Y147R+Q154R; and I76Y+V82S+Y123H+Y147R+Q154R, relative to TadA*7.10, the TadA reference sequence, or a corresponding mutation in another TadA.

[0533] In some embodiments, the adenosine deaminase is TadA*8, which comprises or consists essentially of the following sequence or a fragment thereof having adenosine deaminase activity:

MSEVEESHEY WMRHALTLAK RARDEREVPV GAVLVLNNRV
IGEGWNRAIG LHDPTAHAEI MALRQGGLVM QNYRLIDATL
YVTFEPCVMC AGAMIHSRIG RVVFGVRNAK TGAAGSLMDV
LHYPGMNHRV EITEGILADE CAALLCTFFR MPRQVFNAQK
KAQSSTD

[0534] In some embodiments, the TadA*8 is truncated. In some embodiments, the truncated TadA*8 is missing 1, 2, 3, 4, 5, 6, 7, 8, 9, 10, 11, 12, 13, 14, 15, 6, 17, 18, 19, or 20 N-terminal amino acid residues relative to the full length TadA*8. In some embodiments, the truncated TadA*8 is missing 1, 2, 3, 4, 5, 6, 7, 8, 9, 10, 11, 12, 13, 14, 15, 6, 17, 18, 19, or 20 C-terminal amino acid residues relative to the full length TadA*8. In some embodiments the adenosine deaminase variant is a full-length TadA*8.

[0535] In one embodiment, a fusion protein of the disclosure comprises a wild-type TadA is linked to an adenosine deaminase variant described herein (e.g., TadA*8), which is linked to Cas9 nickase. In particular embodiments, the fusion proteins comprise a single TadA*8 domain (e.g., provided as a monomer). In other embodiments, the base editor comprises TadA*8 and TadA(wt), which are capable of forming heterodimers.

### C to T Editing

[0536] In some embodiments, a base editor disclosed herein comprises a fusion protein comprising cytidine deaminase capable of deaminating a target cytidine (C) base of a polynucleotide to produce uridine (U), which has the base pairing properties of thymine. In some embodiments, for example where the polynucleotide is double-stranded (e.g., DNA), the uridine base can then be substituted with a thymidine base (e.g., by cellular repair machinery) to give rise to a C:G to a T:A transition. In other embodiments, deamination of a C to U in a nucleic acid by a base editor cannot be accompanied by substitution of the U to a T.

[0537] The deamination of a target C in a polynucleotide to give rise to a U is a non-limiting example of a type of base editing that can be executed by a base editor described herein. In another example, a base editor comprising a cytidine deaminase domain can mediate conversion of a cytosine (C) base to a guanine (G) base. For example, a U of a polynucleotide produced by deamination of a cytidine by a cytidine deaminase domain of a base editor can be excised from the polynucleotide by a base excision repair mechanism (e.g., by a uracil DNA glycosylase (UDG) domain), producing an abasic site. The nucleobase opposite the abasic site can then be substituted (e.g., by base repair machinery) with another base, such as a C, by for example a translesion polymerase. Although it is typical for a nucleobase opposite an abasic site to be replaced with a C, other substitutions (e.g., A, G or T) can also occur.

[0538] Accordingly, in some embodiments a base editor described herein comprises a deamination domain (e.g., cytidine deaminase domain) capable of deaminating a target C to a U in a polynucleotide. Further, as described below, the base editor can comprise additional domains which facilitate conversion of the U resulting from deamination to, in some embodiments, a T or a G. For example, a base editor comprising a cytidine deaminase domain can further comprise a uracil glycosylase inhibitor (UGI) domain to mediate substitution of a U by a T, completing a C-to-T base editing event. In another example, a base editor can incorporate a translesion polymerase to improve the efficiency of C-to-G base editing, since a translesion polymerase can facilitate incorporation of a C opposite an abasic site (i.e., resulting in incorporation of a G at the abasic site, completing the C-to-G base editing event).

[0539] A base editor comprising a cytidine deaminase as a domain can deaminate a target C in any polynucleotide, including DNA, RNA and DNA-RNA hybrids. Typically, a cytidine deaminase catalyzes a C nucleobase that is positioned in the context of a single-stranded portion of a polynucleotide. In some embodiments, the entire polynucleotide comprising a target C can be single-stranded. For example, a cytidine deaminase incorporated into the base editor can deaminate a target C in a single-stranded RNA polynucleotide. In other embodiments, a base editor comprising a cytidine deaminase domain can act on a double-stranded polynucleotide, but the target C can be positioned in a portion of the polynucleotide which at the time of the deamination reaction is in a single-stranded state. For example, in embodiments where the NAGPB domain comprises a Cas9 domain, several nucleotides can be left unpaired during formation of the Cas9-gRNA-target DNA complex, resulting in formation of a Cas9 “R-loop complex”. These unpaired nucleotides can form a bubble of single-stranded DNA that can serve as a substrate for a single-strand specific nucleotide deaminase enzyme (e.g., cytidine deaminase).

[0540] In some embodiments, a cytidine deaminase of a base editor can comprise all or a portion of an apolipoprotein B mRNA editing complex (APOBEC) family deaminase. APOBEC is a family of evolutionarily conserved cytidine deaminases. Members of this family are C-to-U editing enzymes. The N-terminal domain of APOBEC like proteins is the catalytic domain, while the C-terminal domain is a pseudocatalytic domain. More specifically, the catalytic domain is a zinc dependent cytidine deaminase domain and is important for cytidine deamination. APOBEC family members include APOBEC1, APOBEC2, APOBEC3A, APOBEC3B, APOBEC3C, APOBEC3D (“APOBEC3E” now refers to this), APOBEC3F, APOBEC3G, APOBEC3H, APOBEC4, and Activation-induced (cytidine) deaminase. In some embodiments, a deaminase incorporated into a base editor comprises all or a portion of an APOBEC1 deaminase. In some embodiments, a deaminase incorporated into a base editor comprises all or a portion of APOBEC2 deaminase. In some embodiments, a deaminase incorporated into a base editor comprises all or a portion of is an APOBEC3 deaminase. In some embodiments, a deaminase incorporated into a base editor comprises all or a portion of an APOBEC3A deaminase. In some embodiments, a deaminase incorporated into a base editor comprises all or a portion of APOBEC3B deaminase. In some embodiments, a deaminase incorporated into a base editor comprises all or a portion of APOBEC3C deaminase. In some embodiments, a deaminase incorporated into a base editor comprises all or a portion of APOBEC3D deaminase. In some embodiments, a deaminase incorporated into a base editor comprises all or a portion of APOBEC3E deaminase. In some embodiments, a deaminase incorporated into a base editor comprises all or a portion of APOBEC3F deaminase. In some embodiments, a deaminase incorporated into a base editor comprises all or a portion of APOBEC3G deaminase. In some embodiments, a deaminase incorporated into a base editor comprises all or a portion of APOBEC3H deaminase. In some embodiments, a deaminase incorporated into a base editor comprises all or a portion of APOBEC4 deaminase. In some embodiments, a deaminase incorporated into a base editor comprises all or a portion of activation-induced deaminase (AID). In some embodiments a deaminase incorporated into a base editor comprises all or a portion of cytidine deaminase 1 (CDA1). It should be appreciated that a base editor can comprise a deaminase from any suitable organism (e.g., a human or a rat). In some embodiments, a deaminase domain of a base editor is from a human, chimpanzee, gorilla, monkey, cow, dog, rat, or mouse. In some embodiments, the deaminase domain of the base editor is derived from rat (e.g., rat APOBEC1). In some embodiments, the deaminase domain of the base editor is human APOBEC1. In some embodiments, the deaminase domain of the base editor is pmCDA1.

[0541] The amino acid and nucleic acid sequences of PmCDA1 are shown herein below. >tr|A5H718|A5H718_PETMA Cytosine deaminase OS=Petromyzon marinus OX=7757 PE=2 SV=1 amino acid sequence:

MTDAEYVRIHEKLDIYTFKKQFFNNKKSVSHRCYVLFELKRRGERRACFW
GYAVNKPQSGTERGIHAEIFSIRKVEEYLRDNPGQFTINWYSSWSPCADC
AEKILEWYNQELRGNGHTLKIWACKLYYEKNARNQIGLWNLRDNGVGLNV
MVSEHYQCCRKIFIQSSHNQLNENRWLEKTLKRAEKRRSELSIMIQVKIL
HTTKSPAV

Nucleic acid sequence: >EF094822.1 Petromyzon marinus isolate PmCDA.21 cytosine deaminase mRNA, complete cds:

TGACACGACACAGCCGTGTATATGAGGAAGGGTAGCTGGATGGGGGGGGG
GGGAATACGTTCAGAGAGGACATTAGCGAGCGTCTTGTTGGTGGCCTTGA
GTCTAGACACCTGCAGACATGACCGACGCTGAGTACGTGAGAATCCATGA
GAAGTTGGACATCTACACGTTTAAGAAACAGTTTTTCAACAACAAAAAAT
CCGTGTCGCATAGATGCTACGTTCTCTTTGAATTAAAACGACGGGGTGAA
CGTAGAGCGTGTTTTTGGGGCTATGCTGTGAATAAACCACAGAGCGGGAC
AGAACGTGGAATTCACGCCGAAATCTTTAGCATTAGAAAAGTCGAAGAAT
ACCTGCGCGACAACCCCGGACAATTCACGATAAATTGGTACTCATCCTGG
AGTCCTTGTGCAGATTGCGCTGAAAAGATCTTAGAATGGTATAACCAGGA
GCTGCGGGGGAACGGCCACACTTTGAAAATCTGGGCTTGCAAACTCTATT
ACGAGAAAAATGCGAGGAATCAAATTGGGCTGTGGAACCTCAGAGATAAC
GGGGTTGGGTTGAATGTAATGGTAAGTGAACACTACCAATGTTGCAGGAA
AATATTCATCCAATCGTCGCACAATCAATTGAATGAGAATAGATGGCTTG
AGAAGACTTTGAAGCGAGCTGAAAAACGACGGAGCGAGTTGTCCATTATG
ATTCAGGTAAAAATACTCCACACCACTAAGAGTCCTGCTGTTTAAGAGGC
TATGCGGATGGTTTTC

[0542] The amino acid and nucleic acid sequences of the coding sequence (CDS) of human activation-induced cytidine deaminase (AID) are shown below. >tr|Q6QJ80|Q6QJ80_HUMAN Activation-induced cytidine deaminase OS=Homo sapiens OX=9606 GN=AICDA PE=2 SV=1 amino acid sequence:

MDSLLMNRRKFLYQFKNVRWAKGRRETYLCYVVKRRDSATSFSLDFGYLR
NKNGCHVELLFLRYISDWDLDPGRCYRVTWFTSWSPCYDCARHVADFLRG
NPNLSLRIFTARLYFCEDRKAEPEGLRRLHRAGVQIAIMTFKAPV

[0543] The amino acid and nucleic acid sequences of the coding sequence (CDS) of human activation-induced cytidine deaminase (AID) are shown below. >tr|Q6QJ80|Q6QJ80_HUMAN Activation-induced cytidine deaminase OS=Homo sapiens OX=9606 GN=AICDA PE=2 SV=1 amino acid sequence:

MDSLLMNRRKFLYQFKNVRWAKGRRETYLCYVVKRRDSATSFSLDFGYLR
NKNGCHVELLFLRYISDWDLDPGRCYRVTWFTSWSPCYDCARHVADFLRG
NPNLSLRIFTARLYFCEDRKAEPEGLRRLHRAGVQIAIMTFKAPV

[0544] Nucleic acid sequence: >NG_011588.1:5001-15681 Homo sapiens activation induced cytidine deaminase (AICDA), RefSeqGene (LRG_17) on chromosome 12:

AGAGAACCATCATTAATTGAAGTGAGATTTTTCTGGCCTGAGACTTGCAGGGAGGCAAGAAG
ACACTCTGGACACCACTATGGACAGGTAAAGAGGCAGTCTTCTCGTGGGTGATTGCACTGGC
CTTCCTCTCAGAGCAAATCTGAGTAATGAGACTGGTAGCTATCCCTTTCTCTCATGTAACTG
TCTGACTGATAAGATCAGCTTGATCAATATGCATATATATTTTTTGATCTGTCTCCTTTTCT
TCTATTCAGATCTTATACGCTGTCAGCCCAATTCTTTCTGTTTCAGACTTCTCTTGATTTCC
CTCTTTTTCATGTGGCAAAAGAAGTAGTGCGTACAATGTACTGATTCGTCCTGAGATTTGTA
CCATGGTTGAAACTAATTTATGGTAATAATATTAACATAGCAAATCTTTAGAGACTCAAATC
ATGAAAAGGTAATAGCAGTACTGTACTAAAAACGGTAGTGCTAATTTTCGTAATAATTTTGT
AAATATTCAACAGTAAAACAACTTGAAGACACACTTTCCTAGGGAGGCGTTACTGAAATAAT
TTAGCTATAGTAAGAAAATTTGTAATTTTAGAAATGCCAAGCATTCTAAATTAATTGCTTGA
AAGTCACTATGATTGTGTCCATTATAAGGAGACAAATTCATTCAAGCAAGTTATTTAATGTT
AAAGGCCCAATTGTTAGGCAGTTAATGGCACTTTTACTATTAACTAATCTTTCCATTTGTTC
AGACGTAGCTTAACTTACCTCTTAGGTGTGAATTTGGTTAAGGTCCTCATAATGTCTTTATG
TGCAGTTTTTGATAGGTTATTGTCATAGAACTTATTCTATTCCTACATTTATGATTACTATG
GATGTATGAGAATAACACCTAATCCTTATACTTTACCTCAATTTAACTCCTTTATAAAGAAC
TTACATTACAGAATAAAGATTTTTTAAAAATATATTTTTTTGTAGAGACAGGGTCTTAGCCC
AGCCGAGGCTGGTCTCTAAGTCCTGGCCCAAGCGATCCTCCTGCCTGGGCCTCCTAAAGTGC
TGGAATTATAGACATGAGCCATCACATCCAATATACAGAATAAAGATTTTTAATGGAGGATT
TAATGTTCTTCAGAAAATTTTCTTGAGGTCAGACAATGTCAAATGTCTCCTCAGTTTACACT
GAGATTTTGAAAACAAGTCTGAGCTATAGGTCCTTGTGAAGGGTCCATTGGAAATACTTGTT
CAAAGTAAAATGGAAAGCAAAGGTAAAATCAGCAGTTGAAATTCAGAGAAAGACAGAAAAGG
AGAAAAGATGAAATTCAACAGGACAGAAGGGAAATATATTATCATTAAGGAGGACAGTATCT
GTAGAGCTCATTAGTGATGGCAAAATGACTTGGTCAGGATTATTTTTAACCCGCTTGTTTCT
GGTTTGCACGGCTGGGGATGCAGCTAGGGTTCTGCCTCAGGGAGCACAGCTGTCCAGAGCAG
CTGTCAGCCTGCAAGCCTGAAACACTCCCTCGGTAAAGTCCTTCCTACTCAGGACAGAAATG
ACGAGAACAGGGAGCTGGAAACAGGCCCCTAACCAGAGAAGGGAAGTAATGGATCAACAAAG
TTAACTAGCAGGTCAGGATCACGCAATTCATTTCACTCTGACTGGTAACATGTGACAGAAAC
AGTGTAGGCTTATTGTATTTTCATGTAGAGTAGGACCCAAAAATCCACCCAAAGTCCTTTAT
CTATGCCACATCCTTCTTATCTATACTTCCAGGACACTTTTTCTTCCTTATGATAAGGCTCT
CTCTCTCTCCACACACACACACACACACACACACACACACACACACACACACACAAACACAC
ACCCCGCCAACCAAGGTGCATGTAAAAAGATGTAGATTCCTCTGCCTTTCTCATCTACACAG
CCCAGGAGGGTAAGTTAATATAAGAGGGATTTATTGGTAAGAGATGATGCTTAATCTGTTTA
ACACTGGGCCTCAAAGAGAGAATTTCTTTTCTTCTGTACTTATTAAGCACCTATTATGTGTT
GAGCTTATATATACAAAGGGTTATTATATGCTAATATAGTAATAGTAATGGTGGTTGGTACT
ATGGTAATTACCATAAAAATTATTATCCTTTTAAAATAAAGCTAATTATTATTGGATCTTTT
TTAGTATTCATTTTATGTTTTTTATGTTTTTGATTTTTTAAAAGACAATCTCACCCTGTTAC
CCAGGCTGGAGTGCAGTGGTGCAATCATAGCTTTCTGCAGTCTTGAACTCCTGGGCTCAAGC
AATCCTCCTGCCTTGGCCTCCCAAAGTGTTGGGATACAGTCATGAGCCACTGCATCTGGCCT
AGGATCCATTTAGATTAAAATATGCATTTTAAATTTTAAAATAATATGGCTAATTTTTACCT
TATGTAATGTGTATACTGGCAATAAATCTAGTTTGCTGCCTAAAGTTTAAAGTGCTTTCCAG
TAAGCTTCATGTACGTGAGGGGAGACATTTAAAGTGAAACAGACAGCCAGGTGTGGTGGCTC
ACGCCTGTAATCCCAGCACTCTGGGAGGCTGAGGTGGGTGGATCGCTTGAGCCCTGGAGTTC
AAGACCAGCCTGAGCAACATGGCAAAACGCTGTTTCTATAACAAAAATTAGCCGGGCATGGT
GGCATGTGCCTGTGGTCCCAGCTACTAGGGGGCTGAGGCAGGAGAATCGTTGGAGCCCAGGA
GGTCAAGGCTGCACTGAGCAGTGCTTGCGCCACTGCACTCCAGCCTGGGTGACAGGACCAGA
CCTTGCCTCAAAAAAATAAGAAGAAAAATTAAAAATAAATGGAAACAACTACAAAGAGCTGT
TGTCCTAGATGAGCTACTTAGTTAGGCTGATATTTTGGTATTTAACTTTTAAAGTCAGGGTC
TGTCACCTGCACTACATTATTAAAATATCAATTCTCAATGTATATCCACACAAAGACTGGTA
CGTGAATGTTCATAGTACCTTTATTCACAAAACCCCAAAGTAGAGACTATCCAAATATCCAT
CAACAAGTGAACAAATAAACAAAATGTGCTATATCCATGCAATGGAATACCACCCTGCAGTA
CAAAGAAGCTACTTGGGGATGAATCCCAAAGTCATGACGCTAAATGAAAGAGTCAGACATGA
AGGAGGAGATAATGTATGCCATACGAAATTCTAGAAAATGAAAGTAACTTATAGTTACAGAA
AGCAAATCAGGGCAGGCATAGAGGCTCACACCTGTAATCCCAGCACTTTGAGAGGCCACGTG
GGAAGATTGCTAGAACTCAGGAGTTCAAGACCAGCCTGGGCAACACAGTGAAACTCCATTCT
CCACAAAAATGGGAAAAAAAGAAAGCAAATCAGTGGTTGTCCTGTGGGGAGGGGAAGGACTG
CAAAGAGGGAAGAAGCTCTGGTGGGGTGAGGGTGGTGATTCAGGTTCTGTATCCTGACTGTG
GTAGCAGTTTGGGGTGTTTACATCCAAAAATATTCGTAGAATTATGCATCTTAAATGGGTGG
AGTTTACTGTATGTAAATTATACCTCAATGTAAGAAAAAATAATGTGTAAGAAAACTTTCAA
TTCTCTTGCCAGCAAACGTTATTCAAATTCCTGAGCCCTTTACTTCGCAAATTCTCTGCACT
TCTGCCCCGTACCATTAGGTGACAGCACTAGCTCCACAAATTGGATAAATGCATTTCTGGAA
AAGACTAGGGACAAAATCCAGGCATCACTTGTGCTTTCATATCAACCATGCTGTACAGCTTG
TGTTGCTGTCTGCAGCTGCAATGGGGACTCTTGATTTCTTTAAGGAAACTTGGGTTACCAGA
GTATTTCCACAAATGCTATTCAAATTAGTGCTTATGATATGCAAGACACTGTGCTAGGAGCC
AGAAAACAAAGAGGAGGAGAAATCAGTCATTATGTGGGAACAACATAGCAAGATATTTAGAT
CATTTTGACTAGTTAAAAAAGCAGCAGAGTACAAAATCACACATGCAATCAGTATAATCCAA
ATCATGTAAATATGTGCCTGTAGAAAGACTAGAGGAATAAACACAAGAATCTTAACAGTCAT
TGTCATTAGACACTAAGTCTAATTATTATTATTAGACACTATGATATTTGAGATTTAAAAAA
TCTTTAATATTTTAAAATTTAGAGCTCTTCTATTTTTCCATAGTATTCAAGTTTGACAATGA
TCAAGTATTACTCTTTCTTTTTTTTTTTTTTTTTTTTTTTTTGAGATGGAGTTTTGGTCTTG
TTGCCCATGCTGGAGTGGAATGGCATGACCATAGCTCACTGCAACCTCCACCTCCTGGGTTC
AAGCAAAGCTGTCGCCTCAGCCTCCCGGGTAGATGGGATTACAGGCGCCCACCACCACACTC
GGCTAATGTTTGTATTTTTAGTAGAGATGGGGTTTCACCATGTTGGCCAGGCTGGTCTCAAA
CTCCTGACCTCAGAGGATCCACCTGCCTCAGCCTCCCAAAGTGCTGGGATTACAGATGTAGG
CCACTGCGCCCGGCCAAGTATTGCTCTTATACATTAAAAAACAGGTGTGAGCCACTGCGCCC
AGCCAGGTATTGCTCTTATACATTAAAAAATAGGCCGGTGCAGTGGCTCACGCCTGTAATCC
CAGCACTTTGGGAAGCCAAGGCGGGCAGAACACCCGAGGTCAGGAGTCCAAGGCCAGCCTGG
CCAAGATGGTGAAACCCCGTCTCTATTAAAAATACAAACATTACCTGGGCATGATGGTGGGC
GCCTGTAATCCCAGCTACTCAGGAGGCTGAGGCAGGAGGATCCGCGGAGCCTGGCAGATCTG
CCTGAGCCTGGGAGGTTGAGGCTACAGTAAGCCAAGATCATGCCAGTATACTTCAGCCTGGG
CGACAAAGTGAGACCGTAACAAAAAAAAAAAAATTTAAAAAAAGAAATTTAGATCAAGATCC
AACTGTAAAAAGTGGCCTAAACACCACATTAAAGAGTTTGGAGTTTATTCTGCAGGCAGAAG
AGAACCATCAGGGGGTCTTCAGCATGGGAATGGCATGGTGCACCTGGTTTTTGTGAGATCAT
GGTGGTGACAGTGTGGGGAATGTTATTTTGGAGGGACTGGAGGCAGACAGACCGGTTAAAAG
GCCAGCACAACAGATAAGGAGGAAGAAGATGAGGGCTTGGACCGAAGCAGAGAAGAGCAAAC
AGGGAAGGTACAAATTCAAGAAATATTGGGGGGTTTGAATCAACACATTTAGATGATTAATT
AAATATGAGGACTGAGGAATAAGAAATGAGTCAAGGATGGTTCCAGGCTGCTAGGCTGCTTA
CCTGAGGTGGCAAAGTCGGGAGGAGTGGCAGTTTAGGACAGGGGGCAGTTGAGGAATATTGT
TTTGATCATTTTGAGTTTGAGGTACAAGTTGGACACTTAGGTAAAGACTGGAGGGGAAATCT
GAATATACAATTATGGGACTGAGGAACAAGTTTATTTTATTTTTTGTTTCGTTTTCTTGTTG
AAGAACAAATTTAATTGTAATCCCAAGTCATCAGCATCTAGAAGACAGTGGCAGGAGGTGAC
TGTCTTGTGGGTAAGGGTTTGGGGTCCTTGATGAGTATCTCTCAATTGGCCTTAAATATAAG
CAGGAAAAGGAGTTTATGATGGATTCCAGGCTCAGCAGGGCTCAGGAGGGCTCAGGCAGCCA
GCAGAGGAAGTCAGAGCATCTTCTTTGGTTTAGCCCAAGTAATGACTTCCTTAAAAAGCTGA
AGGAAAATCCAGAGTGACCAGATTATAAACTGTACTCTTGCATTTTCTCTCCCTCCTCTCAC
CCACAGCCTCTTGATGAACCGGAGGAAGTTTCTTTACCAATTCAAAAATGTCCGCTGGGCTA
AGGGTCGGCGTGAGACCTACCTGTGCTACGTAGTGAAGAGGCGTGACAGTGCTACATCCTTT
TCACTGGACTTTGGTTATCTTCGCAATAAGGTATCAATTAAAGTCGGCTTTGCAAGCAGTTT
AATGGTCAACTGTGAGTGCTTTTAGAGCCACCTGCTGATGGTATTACTTCCATCCTTTTTTG
GCATTTGTGTCTCTATCACATTCCTCAAATCCTTTTTTTTATTTCTTTTTCCATGTCCATGC
ACCCATATTAGACATGGCCCAAAATATGTGATTTAATTCCTCCCCAGTAATGCTGGGCACCC
TAATACCACTCCTTCCTTCAGTGCCAAGAACAACTGCTCCCAAACTGTTTACCAGCTTTCCT
CAGCATCTGAATTGCCTTTGAGATTAATTAAGCTAAAAGCATTTTTATATGGGAGAATATTA
TCAGCTTGTCCAAGCAAAAATTTTAAATGTGAAAAACAAATTGTGTCTTAAGCATTTTTGAA
AATTAAGGAAGAAGAATTTGGGAAAAAATTAACGGTGGCTCAATTCTGTCTTCCAAATGATT
TCTTTTCCCTCCTACTCACATGGGTCGTAGGCCAGTGAATACATTCAACATGGTGATCCCCA
GAAAACTCAGAGAAGCCTCGGCTGATGATTAATTAAATTGATCTTTCGGCTACCCGAGAGAA
TTACATTTCCAAGAGACTTCTTCACCAAAATCCAGATGGGTTTACATAAACTTCTGCCCACG
GGTATCTCCTCTCTCCTAACACGCTGTGACGTCTGGGCTTGGTGGAATCTCAGGGAAGCATC
CGTGGGGTGGAAGGTCATCGTCTGGCTCGTTGTTTGATGGTTATATTACCATGCAATTTTCT
TTGCCTACATTTGTATTGAATACATCCCAATCTCCTTCCTATTCGGTGACATGACACATTCT
ATTTCAGAAGGCTTTGATTTTATCAAGCACTTTCATTTACTTCTCATGGCAGTGCCTATTAC
TTCTCTTACAATACCCATCTGTCTGCTTTACCAAAATCTATTTCCCCTTTTCAGATCCTCCC
AAATGGTCCTCATAAACTGTCCTGCCTCCACCTAGTGGTCCAGGTATATTTCCACAATGTTA
CATCAACAGGCACTTCTAGCCATTTTCCTTCTCAAAAGGTGCAAAAAGCAACTTCATAAACA
CAAATTAAATCTTCGGTGAGGTAGTGTGATGCTGCTTCCTCCCAACTCAGCGCACTTCGTCT
TCCTCATTCCACAAAAACCCATAGCCTTCCTTCACTCTGCAGGACTAGTGCTGCCAAGGGTT
CAGCTCTACCTACTGGTGTGCTCTTTTGAGCAAGTTGCTTAGCCTCTCTGTAACACAAGGAC
AATAGCTGCAAGCATCCCCAAAGATCATTGCAGGAGACAATGACTAAGGCTACCAGAGCCGC
AATAAAAGTCAGTGAATTTTAGCGTGGTCCTCTCTGTCTCTCCAGAACGGCTGCCACGTGGA
ATTGCTCTTCCTCCGCTACATCTCGGACTGGGACCTAGACCCTGGCCGCTGCTACCGCGTCA
CCTGGTTCACCTCCTGGAGCCCCTGCTACGACTGTGCCCGACATGTGGCCGACTTTCTGCGA
GGGAACCCCAACCTCAGTCTGAGGATCTTCACCGCGCGCCTCTACTTCTGTGAGGACCGCAA
GGCTGAGCCCGAGGGGCTGCGGCGGCTGCACCGCGCCGGGGTGCAAATAGCCATCATGACCT
TCAAAGGTGCGAAAGGGCCTTCCGCGCAGGCGCAGTGCAGCAGCCCGCATTCGGGATTGCGA
TGCGGAATGAATGAGTTAGTGGGGAAGCTCGAGGGGAAGAAGTGGGCGGGGATTCTGGTTCA
CCTCTGGAGCCGAAATTAAAGATTAGAAGCAGAGAAAAGAGTGAATGGCTCAGAGACAAGGC
CCCGAGGAAATGAGAAAATGGGGCCAGGGTTGCTTCTTTCCCCTCGATTTGGAACCTGAACT
GTCTTCTACCCCCATATCCCCGCCTTTTTTTCCTTTTTTTTTTTTTGAAGATTATTTTTACT
GCTGGAATACTTTTGTAGAAAACCACGAAAGAACTTTCAAAGCCTGGGAAGGGCTGCATGAA
AATTCAGTTCGTCTCTCCAGACAGCTTCGGCGCATCCTTTTGGTAAGGGGCTTCCTCGCTTT
TTAAATTTTCTTTCTTTCTCTACAGTCTTTTTTGGAGTTTCGTATATTTCTTATATTTTCTT
ATTGTTCAATCACTCTCAGTTTTCATCTGATGAAAACTTTATTTCTCCTCCACATCAGCTTT
TTCTTCTGCTGTTTCACCATTCAGAGCCCTCTGCTAAGGTTCCTTTTCCCTCCCTTTTCTTT
CTTTTGTTGTTTCACATCTTTAAATTTCTGTCTCTCCCCAGGGTTGCGTTTCCTTCCTGGTC
AGAATTCTTTTCTCCTTTTTTTTTTTTTTTTTTTTTTTTTTTAAACAAACAAACAAAAAACC
CAAAAAAACTCTTTCCCAATTTACTTTCTTCCAACATGTTACAAAGCCATCCACTCAGTTTA
GAAGACTCTCCGGCCCCACCGACCCCCAACCTCGTTTTGAAGCCATTCACTCAATTTGCTTC
TCTCTTTCTCTACAGCCCCTGTATGAGGTTGATGACTTACGAGACGCATTTCGTACTTTGGG
ACTTTGATAGCAACTTCCAGGAATGTCACACACGATGAAATATCTCTGCTGAAGACAGTGGA
TAAAAAACAGTCCTTCAAGTCTTCTCTGTTTTTATTCTTCAACTCTCACTTTCTTAGAGTTT
ACAGAAAAAATATTTATATACGACTCTTTAAAAAGATCTATGTCTTGAAAATAGAGAAGGAA
CACAGGTCTGGCCAGGGACGTGCTGCAATTGGTGCAGTTTTGAATGCAACATTGTCCCCTAC
TGGGAATAACAGAACTGCAGGACCTGGGAGCATCCTAAAGTGTCAACGTTTTTCTATGACTT
TTAGGTAGGATGAGAGCAGAAGGTAGATCCTAAAAAGCATGGTGAGAGGATCAAATGTTTTT
ATATCAACATCCTTTATTATTTGATTCATTTGAGTTAACAGTGGTGTTAGTGATAGATTTTT
CTATTCTTTTCCCTTGACGTTTACTTTCAAGTAACACAAACTCTTCCATCAGGCCATGATCT
ATAGGACCTCCTAATGAGAGTATCTGGGTGATTGTGACCCCAAACCATCTCTCCAAAGCATT
AATATCCAATCATGCGCTGTATGTTTTAATCAGCAGAAGCATGTTTTTATGTTTGTACAAAA
GAAGATTGTTATGGGTGGGGATGGAGGTATAGACCATGCATGGTCACCTTCAAGCTACTTTA
ATAAAGGATCTTAAAATGGGCAGGAGGACTGTGAACAAGACACCCTAATAATGGGTTGATGT
CTGAAGTAGCAAATCTTCTGGAAACGCAAACTCTTTTAAGGAAGTCCCTAATTTAGAAACAC
CCACAAACTTCACATATCATAATTAGCAAACAATTGGAAGGAAGTTGCTTGAATGTTGGGGA
GAGGAAAATCTATTGGCTCTCGTGGGTCTCTTCATCTCAGAAATGCCAATCAGGTCAAGGTT
TGCTACATTTTGTATGTGTGTGATGCTTCTCCCAAAGGTATATTAACTATATAAGAGAGTTG
TGACAAAACAGAATGATAAAGCTGCGAACCGTGGCACACGCTCATAGTTCTAGCTGCTTGGG
AGGTTGAGGAGGGAGGATGGCTTGAACACAGGTGTTCAAGGCCAGCCTGGGCAACATAACAA
GATCCTGTCTCTCAAAAAAAAAAAAAAAAAAAAGAAAGAGAGAGGGCCGGGCGTGGTGGCTC
ACGCCTGTAATCCCAGCACTTTGGGAGGCCGAGCCGGGCGGATCACCTGTGGTCAGGAGTTT
GAGACCAGCCTGGCCAACATGGCAAAACCCCGTCTGTACTCAAAATGCAAAAATTAGCCAGG
CGTGGTAGCAGGCACCTGTAATCCCAGCTACTTGGGAGGCTGAGGCAGGAGAATCGCTTGAA
CCCAGGAGGTGGAGGTTGCAGTAAGCTGAGATCGTGCCGTTGCACTCCAGCCTGGGCGACAA
GAGCAAGACTCTGTCTCAGAAAAAAAAAAAAAAAAGAGAGAGAGAGAGAAAGAGAACAATAT
TTGGGAGAGAAGGATGGGGAAGCATTGCAAGGAAATTGTGCTTTATCCAACAAAATGTAAGG
AGCCAATAAGGGATCCCTATTTGTCTCTTTTGGTGTCTATTTGTCCCTAACAACTGTCTTTG
ACAGTGAGAAAAATATTCAGAATAACCATATCCCTGTGCCGTTATTACCTAGCAACCCTTGC
AATGAAGATGAGCAGATCCACAGGAAAACTTGAATGCACAACTGTCTTATTTTAATCTTATT
GTACATAAGTTTGTAAAAGAGTTAAAAATTGTTACTTCATGTATTCATTTATATTTTATATT
ATTTTGCGTCTAATGATTTTTTATTAACATGATTTCCTTTTCTGATATATTGAAATGGAGTC
TCAAAGCTTCATAAATTTATAACTTTAGAAATGATTCTAATAACAACGTATGTAATTGTAAC
ATTGCAGTAATGGTGCTACGAAGCCATTTCTCTTGATTTTTAGTAAACTTTTATGACAGCAA
ATTTGCTTCTGGCTCACTTTCAATCAGTTAAATAAATGATAAATAATTTTGGAAGCTGTGAA
GATAAAATACCAAATAAAATAATATAAAAGTGATTTATATGAAGTTAAAATAAAAAATCAGT
ATGATGGAATAAACTTG

[0545] Other exemplary deaminases that can be fused to Cas9 according to aspects of this disclosure are provided below. In embodiments, the deaminases are activation-induced deaminases (AID). It should be understood that, in some embodiments, the active domain of the respective sequence can be used, e.g., the domain without a localizing signal (nuclear localization sequence, without nuclear export signal, cytoplasmic localizing signal).

Human AID:
[sequence omitted]
(underline: nuclear localization sequence; double underline:
nuclear export signal)
Mouse AID:
MDSLLMKQKKFLYHFKNVRWAKGRHETYLCYVVKRRDSATSCSLDFGHLRNKSGCHVELLFL
RYISDWDLDPGRCYRVTWFTSWSPCYDCARHVAEFLRWNPNLSLRIFTARLYFCEDRKAEPE
GLRRLHRAGVQIGIMTFKDYFYCWNTFVENRERTFKAWEGLHENSVRLTRQLRRILLPLYEV
DDLRDAFRMLGF
(underline: nuclear localization sequence; double underline:
nuclear export signal)
Canine AID:
MDSLLMKQRKFLYHFKNVRWAKGRHETYLCYVVKRRDSATSFSLDFGHLRNKSGCHVELLFL
RYISDWDLDPGRCYRVTWFTSWSPCYDCARHVADFLRGYPNLSLRIFAARLYFCEDRKAEPE
GLRRLHRAGVQIAIMTFKDYFYCWNTFVENREKTFKAWEGLHENSVRLSRQLRRILLPLYEV
DDLRDAFRTLGL
(underline: nuclear localization sequence; double underline:
nuclear export signal)
Bovine AID:
MDSLLKKQRQFLYQFKNVRWAKGRHETYLCYVVKRRDSPTSFSLDFGHLRNKAGCHVELLFL
RYISDWDLDPGRCYRVTWFTSWSPCYDCARHVADFLRGYPNLSLRIFTARLYFCDKERKAEP
EGLRRLHRAGVQIAIMTFKDYFYCWNTFVENHERTFKAWEGLHENSVRLSRQLRRILLPLYE
VDDLRDAFRTLGL
(underline: nuclear localization sequence; double underline:
nuclear export signal)
Rat AID:
MAVGSKPKAALVGPHWERERIWCFLCSTGLGTQQTGQTSRWLRPAATQDPVSPPRSLLMKQR
KFLYHFKNVRWAKGRHETYLCYVVKRRDSATSFSLDFGYLRNKSGCHVELLFLRYISDWDLD
PGRCYRVTWFTSWSPCYDCARHVADFLRGNPNLSLRIFTARLTGWGALPAGLMSPARPSDYF
YCWNTFVENHERTFKAWEGLHENSVRLSRRLRRILLPLYEVDDLRDAFRTLGL
(underline: nuclear localization sequence; double underline:
nuclear export signal)
clAID (Canis lupus familiaris):
MDSLLMKQRKFLYHFKNVRWAKGRHETYLCYVVKRRDSATSFSLDFGHLRNKSGCHVELLFLRYISDW
DLDPGRCYRVTWFTSWSPCYDCARHVADFLRGYPNLSLRIFAARLYFCEDRKAEPEGLRRLHRAGVQI
AIMTFKDYFYCWNTFVENREKTFKAWEGLHENSVRLSRQLRRILLPLYEVDDLRDAFRTLGL
btAID (Bos Taurus):
MDSLLKKQRQFLYQFKNVRWAKGRHETYLCYVVKRRDSPTSFSLDFGHLRNKAGCHVELLFLRYISDW
DLDPGRCYRVTWFTSWSPCYDCARHVADFLRGYPNLSLRIFTARLYFCDKERKAEPEGLRRLHRAGVQ
IAIMTFKDYFYCWNTFVENHERTFKAWEGLHENSVRLSRQLRRILLPLYEVDDLRDAFRTLGL
mAID (Mus musculus):
[sequence omitted]
rAPOBEC-1 (Rattus norvegicus):
[sequence omitted]
maAPOBEC-1 (Mesocricetus auratus):
MSSETGPVVVDPTLRRRIEPHEFDAFFDQGELRKETCLLYEIRWGGRHNIWRHTGQNTSRHVEINFIE
KFTSERYFYPSTRCSIVWFLSWSPCGECSKAITEFLSGHPNVTLFIYAARLYHHTDQRNRQGLRDLIS
RGVTIRIMTEQEYCYCWRNFVNYPPSNEVYWPRYPNLWMRLYALELYCIHLGLPPCLKIKRRHQYPLT
FFRLNLQSCHYQRIPPHILWATGFI
ppAPOBEC-1 (Pongo pygmaeus):
MTSEKGPSTGDPTLRRRIESWEFDVFYDPRELRKETCLLYEIKWGMSRKIWRSSGKNTTNHVEVNFIK
KFTSERRFHSSISCSITWFLSWSPCWECSQAIREFLSQHPGVTLVIYVARLFWHMDQRNRQGLRDLVN
SGVTIQIMRASEYYHCWRNFVNYPPGDEAHWPQYPPLWMMLYALELHCIILSLPPCLKISRRWQNHLA
FFRLHLQNCHYQTIPPHILLATGLIHPSVTWR
ocAPOBEC1 (Oryctolagus cuniculus):
MASEKGPSNKDYTLRRRIEPWEFEVFFDPQELRKEACLLYEIKWGASSKTWRSSGKNTTNHVEVNFLE
KLTSEGRLGPSTCCSITWFLSWSPCWECSMAIREFLSQHPGVTLIIFVARLFQHMDRRNRQGLKDLVT
SGVTVRVMSVSEYCYCWENFVNYPPGKAAQWPRYPPRWMLMYALELYCIILGLPPCLKISRRHQKQLT
FFSLTPQYCHYKMIPPYILLATGLLQPSVPWR
mdAPOBEC-1 (Monodelphis domestica):
MNSKTGPSVGDATLRRRIKPWEFVAFFNPQELRKETCLLYEIKWGNQNIWRHSNQNTSQHAEINFMEK
FTAERHFNSSVRCSITWFLSWSPCWECSKAIRKFLDHYPNVTLAIFISRLYWHMDQQHRQGLKELVHS
GVTIQIMSYSEYHYCWRNFVDYPQGEEDYWPKYPYLWIMLYVLELHCIILGLPPCLKISGSHSNQLAL
FSLDLQDCHYQKIPYNVLVATGLVQPFVTWR
ppAPOBEC-2 (Pongo pygmaeus):
MAQKEEAAAATEAASQNGEDLENLDDPEKLKELIELPPFEIVTGERLPANFFKFQFRNVEYSSGRNKT
FLCYVVEAQGKGGQVQASRGYLEDEHAAAHAEEAFFNTILPAFDPALRYNVTWYVSSSPCAACADRII
KTLSKTKNLRLLILVGRLFMWEELEIQDALKKLKEAGCKLRIMKPQDFEYVWQNFVEQEEGESKAFQP
WEDIQENFLYYEEKLADILK
btAPOBEC-2 (Bos Taurus):
MAQKEEAAAAAEPASQNGEEVENLEDPEKLKELIELPPFEIVTGERLPAHYFKFQFRNVEYSSGRNKT
FLCYVVEAQSKGGQVQASRGYLEDEHATNHAEEAFFNSIMPTFDPALRYMVTWYVSSSPCAACADRIV
KTLNKTKNLRLLILVGRLFMWEEPEIQAALRKLKEAGCRLRIMKPQDFEYIWQNFVEQEEGESKAFEP
WEDIQENFLYYEEKLADILK
mAPOBEC-3-(1) (Mus musculus):
MQPQRLGPRAGMGPFCLGCSHRKCYSPIRNLISQETFKFHFKNLGYAKGRKDTFLCYEVTRKDCDSPV
SLHHGVFKNKDNIHAEICFLYWFHDKVLKVLSPREEFKITWYMSWSPCFECAEQIVRFLATHHNLSLD
IFSSRLYNVQDPETQQNLCRLVQEGAQVAAMDLYEFKKCWKKFVDNGGRRFRPWKRLLTNFRYQDSKL
QEILRPCYISVPSSSSSTLSNICLTKGLPETRFWVEGRRMDPLSEEEFYSQFYNQRVKHLCYYHRMKP
YLCYQLEQFNGQAPLKGCLLSEKGKQHAEILFLDKIRSMELSQVTITCYLTWSPCPNCAWQLAAFKRD
RPDLILHIYTSRLYFHWKRPFQKGLCSLWQSGILVDVMDLPQFTDCWTNFVNPKRPFWPWKGLEIISR
RTQRRLRRIKESWGLQDLVNDFGNLQLGPPMS
Mouse APOBEC-3-(2):
MGPFCLGCSHRKCYSPIRNLISQETFKFHFKNLGYAKGRKDTFLCYEVTRKDCDSPVSLHHGVFKNKD
NIHAEICFLYWFHDKVLKVLSPREEFKITWYMSWSPCFECAEQIVRFLATHHNLSLDIFSSRLYNVQD
PETQQNLCRLVQEGAQVAAMDLYEFKKCWKKFVDNGGRRFRPWKRLLTNFRYQDSKLQEILRPCYIPV
PSSSSSTLSNICLTKGLPETRFCVEGRRMDPLSEEEFYSQFYNQRVKHLCYYHRMKPYLCYQLEQFNG
QAPLKGCLLSEKGKQHAEILFLDKIRSMELSQVTITCYLTWSPCPNCAWQLAAFKRDRPDLILHIYTS
RLYFHWKRPFQKGLCSLWQSGILVDVMDLPQFTDCWTNFVNPKRPFWPWKGLEIISRRTQRRLRRIKE
SWGLQDLVNDFGNLQLGPPMS
(italic: nucleic acid editing domain)
Rat APOBEC-3:
MGPFCLGCSHRKCYSPIRNLISQETFKFHFKNRLRYAIDRKDTFLCYEVTRKDCDSPVSLHHGVFKNK
DNIHAEICFLYWFHDKVLKVLSPREEFKITWYMSWSPCFECAEQVLRFLATHHNLSLDIFSSRLYNIR
DPENQQNLCRLVQEGAQVAAMDLYEFKKCWKKFVDNGGRRFRPWKKLLTNFRYQDSKLQEILRPCYIP
VPSSSSSTLSNICLTKGLPETRFCVERRRVHLLSEEEFYSQFYNQRVKHLCYYHGVKPYLCYQLEQFN
GQAPLKGCLLSEKGKQHAEILFLDKIRSMELSQVIITCYLTWSPCPNCAWQLAAFKRDRPDLILHIYT
SRLYFHWKRPFQKGLCSLWQSGILVDVMDLPQFTDCWTNFVNPKRPFWPWKGLEIISRRTQRRLHRIK
ESWGLQDLVNDFGNLQLGPPMS
(italic: nucleic acid editing domain)
hAPOBEC-3A (Homo sapiens):
MEASPASGPRHLMDPHIFTSNFNNGIGRHKTYLCYEVERLDNGTSVKMDQHRGFLHNQAKNLLCGEYG
RHAELRFLDLVPSLQLDPAQIYRVTWFISWSPCFSWGCAGEVRAFLQENTHVRLRIFAARIYDYDPLY
KEALQMLRDAGAQVSIMTYDEFKHCWDTFVDHQGCPFQPWDGLDEHSQALSGRLRAILQNQGN
hAPOBEC-3F (Homo sapiens):
MKPHFRNTVERMYRDTFSYNFYNRPILSRRNTVWLCYEVKTKGPSRPRLDAKIFRGQVYSQPEHHAEM
CFLSWFCGNQLPAYKCFQITWFVSWTPCPDCVAKLAEFLAEHPNVTLTISAARLYYYWERDYRRALCR
LSQAGARVKIMDDEEFAYCWENFVYSEGQPFMPWYKFDDNYAFLHRTLKEILRNPMEAMYPHIFYFHF
KNLRKAYGRNESWLCFTMEVVKHHSPVSWKRGVFRNQVDPETHCHAERCFLSWFCDDILSPNTNYEVT
WYTSWSPCPECAGEVAEFLARHSNVNLTIFTARLYYFWDTDYQEGLRSLSQEGASVEIMGYKDFKYCW
ENFVYNDDEPFKPWKGLKYNFLFLDSKLQEILE
Rhesus macaque APOBEC-3G:
MVEPMDPRTFVSNFNNRPILSGLNTVWLCCEVKTKDPSGPPLDAKIFQGKVYSKAKYHPEMRFLRWFH
KWRQLHHDQEYKVTWYVSWSPCTRCANSVATFLAKDPKVTLTIFVARLYYFWKPDYQQALRILCQKRG
GPHATMKIMNYNEFQDCWNKFVDGRGKPFKPRNNLPKHYTLLQATLGELLRHLMDPGTFTSNFNNKPW
VSGQHETYLCYKVERLHNDTWVPLNQHRGFLRNQAPNIHGFPKGRHAELCFLDLIPFWKLDGQQYRVT
CFTSWSPCFSCAQEMAKFISNNEHVSLCIFAARIYDDQGRYQEGLRALHRDGAKIAMMNYSEFEYCWD
TFVDRQGRPFQPWDGLDEHSQALSGRLRAI
(italic: nucleic acid editing domain; underline:
cytoplasmic localization signal)
Chimpanzee APOBEC-3G:
MKPHFRNPVERMYQDTFSDNFYNRPILSHRNTVWLCYEVKTKGPSRPPLDAKIFRGQVYSKLKYHPEM
RFFHWFSKWRKLHRDQEYEVTWYISWSPCTKCTRDVATFLAEDPKVTLTIFVARLYYFWDPDYQEALR
SLCQKRDGPRATMKIMNYDEFQHCWSKFVYSQRELFEPWNNLPKYYILLHIMLGEILRHSMDPPTFTS
NFNNELWVRGRHETYLCYEVERLHNDTWVLLNQRRGFLCNQAPHKHGFLEGRHAELCFLDVIPFWKLD
LHQDYRVTCFTSWSPCFSCAQEMAKFISNNKHVSLCIFAARIYDDQGRCQEGLRTLAKAGAKISIMTY
SEFKHCWDTFVDHQGCPFQPWDGLEEHSQALSGRLRAILQNQGN
(italic: nucleic acid editing domain; underline: cytoplasmic
localization signal)
Green monkey APOBEC-3G:
MNPQIRNMVEQMEPDIFVYYFNNRPILSGRNTVWLCYEVKTKDPSGPPLDANIFQGKLYPEAKDHPEM
KFLHWFRKWRQLHRDQEYEVTWYVSWSPCTRCANSVATFLAEDPKVTLTIFVARLYYFWKPDYQQALR
ILCQERGGPHATMKIMNYNEFQHCWNEFVDGQGKPFKPRKNLPKHYTLLHATLGELLRHVMDPGTFTS
NFNNKPWVSGQRETYLCYKVERSHNDTWVLLNQHRGFLRNQAPDRHGFPKGRHAELCFLDLIPFWKLD
PQQYPVTCFTSWSPCFSCAQKMAKFISNNKHVSLCIFAARIYDDQGRCQEGLRTLHRDGAKIAVMNYS
EFEYCWDTFVDRQGRPFQPWDGLDEHSQALSGRLRAI
(italic: nucleic acid editing domain; underline: cytoplasmic
localization signal)
Human APOBEC-3G:
MKPHFRNTVERMYRDTFSYNFYNRPILSRRNTVWLCYEVKTKGPSRPPLDAKIFRGQVYSELKYHPEM
RFFHWFSKWRKLHRDQEYEVTWYISWSPCTKCTRDMATFLAEDPKVTLTIFVARLYYFWDPDYQEALR
SLCQKRDGPRATMKIMNYDEFQHCWSKFVYSQRELFEPWNNLPKYYILLHIMLGEILRHSMDPPTFTF
NFNNEPWVRGRHETYLCYEVERMHNDTWVLLNQRRGFLCNQAPHKHGFLEGRHAELCFLDVIPFWKLD
LDQDYRVTCFTSWSPCFSCAQEMAKFISKNKHVSLCIFTARIYDDQGRCQEGLRTLAEAGAKISIMTY
SEFKHCWDTFVDHQGCPFQPWDGLDEHSQDLSGRLRAILQNQEN
(italic: nucleic acid editing domain; underline: cytoplasmic
localization signal)
Human APOBEC-3F:
MKPHFRNTVERMYRDTFSYNFYNRPILSRRNTVWLCYEVKTKGPSRPRLDAKIFRGQVYSQPEHHAEM
CFLSWFCGNQLPAYKCFQITWFVSWTPCPDCVAKLAEFLAEHPNVTLTISAARLYYYWERDYRRALCR
LSQAGARVKIMDDEEFAYCWENFVYSEGQPFMPWYKFDDNYAFLHRTLKEILRNPMEAMYPHIFYFHF
KNLRKAYGRNESWLCFTMEVVKHHSPVSWKRGVFRNQVDPETHCHAERCFLSWFCDDILSPNTNYEVT
WYTSWSPCPECAGEVAEFLARHSNVNLTIFTARLYYFWDTDYQEGLRSLSQEGASVEIMGYKDFKYCW
ENFVYNDDEPFKPWKGLKYNFLFLDSKLQEILE
(italic: nucleic acid editing domain)
Human APOBEC-3B:
MNPQIRNPMERMYRDTFYDNFENEPILYGRSYTWLCYEVKIKRGRSNLLWDTGVFRGQVYFKPQYHAE
MCFLSWFCGNQLPAYKCFQITWFVSWTPCPDCVAKLAEFLSEHPNVTLTISAARLYYYWERDYRRALC
RLSQAGARVTIMDYEEFAYCWENFVYNEGQQFMPWYKFDENYAFLHRTLKEILRYLMDPDTFTFNFNN
DPLVLRRRQTYLCYEVERLDNGTWVLMDQHMGFLCNEAKNLLCGFYGRHAELRFLDLVPSLQLDPAQI
YRVTWFISWSPCFSWGCAGEVRAFLQENTHVRLRIFAARIYDYDPLYKEALQMLRDAGAQVSIMTYDE
FEYCWDTFVYRQGCPFQPWDGLEEHSQALSGRLRAILQNQGN
(italic: nucleic acid editing domain)
Rat APOBEC-3B:
MQPQGLGPNAGMGPVCLGCSHRRPYSPIRNPLKKLYQQTFYFHFKNVRYAWGRKNNFLCYEVNGMDCA
LPVPLRQGVFRKQGHIHAELCFIYWFHDKVLRVLSPMEEFKVTWYMSWSPCSKCAEQVARFLAAHRNL
SLAIFSSRLYYYLRNPNYQQKLCRLIQEGVHVAAMDLPEFKKCWNKFVDNDGQPFRPWMRLRINFSFY
DCKLQEIFSRMNLLREDVFYLQFNNSHRVKPVQNRYYRRKSYLCYQLERANGQEPLKGYLLYKKGEQH
VEILFLEKMRSMELSQVRITCYLTWSPCPNCARQLAAFKKDHPDLILRIYTSRLYFWRKKFQKGLCTL
WRSGIHVDVMDLPQFADCWTNFVNPQRPFRPWNELEKNSWRIQRRLRRIKESWGL
Bovine APOBEC-3B:
DGWEVAFRSGTVLKAGVLGVSMTEGWAGSGHPGQGACVWTPGTRNTMNLLREVLFKQQFGNQPRVPAP
YYRRKTYLCYQLKQRNDLTLDRGCFRNKKQRHAERFIDKINSLDLNPSQSYKIICYITWSPCPNCANE
LVNFITRNNHLKLEIFASRLYFHWIKSFKMGLQDLQNAGISVAVMTHTEFEDCWEQFVDNQSRPFQPW
DKLEQYSASIRRRLQRILTAPI
Chimpanzee APOBEC-3B:
MNPQIRNPMEWMYQRTFYYNFENEPILYGRSYTWLCYEVKIRRGHSNLLWDTGVFRGQMYSQPEHHAE
MCFLSWFCGNQLSAYKCFQITWFVSWTPCPDCVAKLAKFLAEHPNVTLTISAARLYYYWERDYRRALC
RLSQAGARVKIMDDEEFAYCWENFVYNEGQPFMPWYKFDDNYAFLHRTLKEIIRHLMDPDTFTFNFNN
DPLVLRRHQTYLCYEVERLDNGTWVLMDQHMGFLCNEAKNLLCGFYGRHAELRFLDLVPSLQLDPAQI
YRVTWFISWSPCFSWGCAGQVRAFLQENTHVRLRIFAARIYDYDPLYKEALQMLRDAGAQVSIMTYDE
FEYCWDTFVYRQGCPFQPWDGLEEHSQALSGRLRAILQVRASSLCMVPHRPPPPPQSPGPCLPLCSEP
PLGSLLPTGRPAPSLPFLLTASFSFPPPASLPPLPSLSLSPGHLPVPSFHSLTSCSIQPPCSSRIRET
EGWASVSKEGRDLG
Human APOBEC-3C:
MNPQIRNPMKAMYPGTFYFQFKNLWEANDRNETWLCFTVEGIKRRSVVSWKTGVFRNQVDSETHCHAE
RCFLSWFCDDILSPNTKYQVTWYTSWSPCPDCAGEVAEFLARHSNVNLTIFTARLYYFQYPCYQEGLR
SLSQEGVAVEIMDYEDFKYCWENFVYNDNEPFKPWKGLKTNFRLLKRRLRESLQ
(italic: nucleic acid editing domain)
Gorilla APOBEC-3C
MNPQIRNPMKAMYPGTFYFQFKNLWEANDRNETWLCFTVEGIKRRSVVSWKTGVFRNQVDSETHCHAE
RCFLSWECDDILSPNTNYQVTWYTSWSPCPECAGEVAEFLARHSNVNLTIFTARLYYFQDTDYQEGLR
SLSQEGVAVKIMDYKDFKYCWENFVYNDDEPFKPWKGLKYNFRFLKRRLQEILE
(italic: nucleic acid editing domain)
Human APOBEC-3A:
MEASPASGPRHLMDPHIFTSNFNNGIGRHKTYLCYEVERLDNGTSVKMDQHRGFLHNQAKNLLCGFYG
RHAELRFLDLVPSLQLDPAQIYRVTWFISWSPCFSWGCAGEVRAFLQENTHVRLRIFAARIYDYDPLY
KEALQMLRDAGAQVSIMTYDEFKHCWDTFVDHQGCPFQPWDGLDEHSQALSGRLRAILQNQGN
(italic: nucleic acid editing domain)
Rhesus macaque APOBEC-3A:
MDGSPASRPRHLMDPNTFTFNFNNDLSVRGRHQTYLCYEVERLDNGTWVPMDERRGFLCNKAKNVPCG
DYGCHVELRFLCEVPSWQLDPAQTYRVTWFISWSPCFRRGCAGQVRVFLQENKHVRLRIFAARIYDYD
PLYQEALRTLRDAGAQVSIMTYEEFKHCWDTFVDRQGRPFQPWDGLDEHSQALSGRLRAILQNQGN
(italic: nucleic acid editing domain)
Bovine APOBEC-3A:
MDEYTFTENFNNQGWPSKTYLCYEMERLDGDATIPLDEYKGFVRNKGLDQPEKPCHAEAYFAGKIHSW
NLDRNQHYRLTCFISWSPCYDCAQKLTTFLKENHHISLHILASRIYTHNRFGCHQSGLCELQAAGARI
TIMTFEDFKHCWETFVDHKGKPFQPWEGLNVKSQALCTELQAILKTQQN
(italic: nucleic acid editing domain)
Human APOBEC-3H:
MALLTAETFRLQFNNKRRLRRPYYPRKALLCYQLTPQNGSTPTRGYFENKKKCHAEICFINEIKSMGL
DETQCYQVTCYLTWSPCSSCAWELVDFIKAHDHLNLGIFASRLYYHWCKPQQKGLRLLCGSQVPVEVM
GFPKFADCWENFVDHEKPLSFNPYKMLEELDKNSRAIKRRLERIKIPGVRAQGRYMDILCDAEV
(italic: nucleic acid editing domain)
Rhesus macaque APOBEC-3H:
MALLTAKTFSLQFNNKRRVNKPYYPRKALLCYQLTPQNGSTPTRGHLKNKKKDHAEIRFINKIKSMGL
DETQCYQVTCYLTWSPCPSCAGELVDFIKAHRHLNLRIFASRLYYHWRPNYQEGLLLLCGSQVPVEVM
GLPEFTDCWENFVDHKEPPSFNPSEKLEELDKNSQAIKRRLERIKSRSVDVLENGLRSLQLGPVTPSS
SIRNSR
Human APOBEC-3D:
MNPQIRNPMERMYRDTFYDNFENEPILYGRSYTWLCYEVKIKRGRSNLLWDTGVFRGPVLPKRQSNHR
QEVYFRFENHAEMCFLSWFCGNRLPANRRFQITWFVSWNPCLPCVVKVTKFLAEHPNVTLTISAARLY
YYRDRDWRWVLLRLHKAGARVKIMDYEDFAYCWENFVCNEGQPFMPWYKFDDNYASLHRTLKEILRNP
MEAMYPHIFYFHFKNLLKACGRNESWLCFTMEVTKHHSAVFRKRGVFRNQVDPETHCHAERCFLSWFC
DDILSPNTNYEVTWYTSWSPCPECAGEVAEFLARHSNVNLTIFTARLCYFWDTDYQEGLCSLSQEGAS
VKIMGYKDFVSCWKNFVYSDDEPFKPWKGLQTNFRLLKRRLREILQ
(italic: nucleic acid editing domain)
Human APOBEC-1:
MTSEKGPSTGDPTLRRRIEPWEFDVFYDPRELRKEACLLYEIKWGMSRKIWRSSGKNTTNHVEVNFIK
KFTSERDFHPSMSCSITWFLSWSPCWECSQAIREFLSRHPGVTLVIYVARLFWHMDQQNRQGLRDLVN
SGVTIQIMRASEYYHCWRNFVNYPPGDEAHWPQYPPLWMMLYALELHCIILSLPPCLKISRRWQNHLT
FFRLHLQNCHYQTIPPHILLATGLIHPSVAWR
Mouse APOBEC-1:
MSSETGPVAVDPTLRRRIEPHEFEVFFDPRELRKETCLLYEINWGGRHSVWRHTSQNTSNHVEVNFLE
KFTTERYFRPNTRCSITWFLSWSPCGECSRAITEFLSRHPYVTLFIYIARLYHHTDQRNRQGLRDLIS
SGVTIQIMTEQEYCYCWRNFVNYPPSNEAYWPRYPHLWVKLYVLELYCIILGLPPCLKILRRKQPQLT
FFTITLQTCHYQRIPPHLLWATGLK
Rat APOBEC-1:
[sequence omitted]
Human APOBEC-2:
MAQKEEAAVATEAASQNGEDLENLDDPEKLKELIELPPFEIVTGERLPANFFKFQFRNVEYSSGRNKT
FLCYVVEAQGKGGQVQASRGYLEDEHAAAHAEEAFFNTILPAFDPALRYNVTWYVSSSPCAACADRII
KTLSKTKNLRLLILVGRLFMWEEPEIQAALKKLKEAGCKLRIMKPQDFEYVWQNFVEQEEGESKAFQP
WEDIQENFLYYEEKLADILK
Mouse APOBEC-2:
MAQKEEAAEAAAPASQNGDDLENLEDPEKLKELIDLPPFEIVTGVRLPVNFFKFQFRNVEYSSGRNKT
FLCYVVEVQSKGGQAQATQGYLEDEHAGAHAEEAFFNTILPAFDPALKYNVTWYVSSSPCAACADRIL
KTLSKTKNLRLLILVSRLFMWEEPEVQAALKKLKEAGCKLRIMKPQDFEYIWQNFVEQEEGESKAFEP
WEDIQENFLYYEEKLADILK
Rat APOBEC-2:
MAQKEEAAEAAAPASQNGDDLENLEDPEKLKELIDLPPFEIVTGVRLPVNFFKFQFRNVEYSSGRNKT
FLCYVVEAQSKGGQVQATQGYLEDEHAGAHAEEAFFNTILPAFDPALKYNVTWYVSSSPCAACADRIL
KTLSKTKNLRLLILVSRLFMWEEPEVQAALKKLKEAGCKLRIMKPQDFEYLWQNFVEQEEGESKAFEP
WEDIQENFLYYEEKLADILK
Bovine APOBEC-2:
MAQKEEAAAAAEPASQNGEEVENLEDPEKLKELIELPPFEIVTGERLPAHYFKFQFRNVEYSSGRNKT
FLCYVVEAQSKGGQVQASRGYLEDEHATNHAEEAFFNSIMPTFDPALRYMVTWYVSSSPCAACADRIV
KTLNKTKNLRLLILVGRLFMWEEPEIQAALRKLKEAGCRLRIMKPQDFEYIWQNFVEQEEGESKAFEP
WEDIQENFLYYEEKLADILK
Petromyzon marinus CDA1 (pmCDA1):
MTDAEYVRIHEKLDIYTFKKQFFNNKKSVSHRCYVLFELKRRGERRACFWGYAVNKPQSGTERGIHAE
IFSIRKVEEYLRDNPGQFTINWYSSWSPCADCAEKILEWYNQELRGNGHTLKIWACKLYYEKNARNQI
GLWNLRDNGVGLNVMVSEHYQCCRKIFIQSSHNQLNENRWLEKTLKRAEKRRSELSFMIQVKILHTTK
SPAV
Human APOBEC3G D316R D317R:
MKPHFRNTVERMYRDTFSYNFYNRPILSRRNTVWLCYEVKTKGPSRPPLDAKIFRGQVYSELKYHPEM
RFFHWFSKWRKLHRDQEYEVTWYISWSPCTKCTRDMATFLAEDPKVTLTIFVARLYYFWDPDYQEALR
SLCQKRDGPRATMKFNYDEFQHCWSKFVYSQRELFEPWNNLPKYYILLHFMLGEILRHSMDPPTFTFN
FNNEPWVRGRHETYLCYEVERMHNDTWVLLNQRRGFLCNQAPHKHGFLEGRHAELCFLDVIPFWKLDL
DQDYRVTCFTSWSPCFSCAQEMAKFISKKHVSLCIFTARIYRRQGRCQEGLRTLAEAGAKISFTYSEF
KHCWDTFVDHQGCPFQPWDGLDEHSQDLSGRLRAILQNQEN
Human APOBEC3G chain A:
MDPPTFTFNFNNEPWWGRHETYLCYEVERMHNDTWVLLNQRRGFLCNQAPHKHGFLEGRHAELCFLDV
IPFWKLDLDQDYRVTCFTSWSPCFSCAQEMAKFISKNKHVSLCIFTARIYDDQGRCQEGLRTLAEAGA
KISFTYSEFKHCWDTFVDHQGCPFQPWDGLDEHSQDLSGRLRAILQ
Human APOBEC3G chain A D120R D121R:
MDPPTFTFNFNNEPWVRGRHETYLCYEVERMHNDTWVLLNQRRGFLCNQAPHKHGFLEGRHAELCFLD
VIPFWKLDLDQDYRVTCFTSWSPCFSCAQEMAKFISKNKHVSLCIFTARIYRRQGRCQEGLRTLAEAG
AKISFMTYSEFKHCWDTFVDHQGCPFQPWDGLDEHSQDLSGRLRAILQ
hAPOBEC-4 (Homo sapiens):
MEPIYEEYLANHGTIVKPYYWLSFSLDCSNCPYHIRTGEEARVSLTEFCQIFGFPYGTTFPQTKHLTF
YELKTSSGSLVQKGHASSCTGNYIHPESMLFEMNGYLDSAIYNNDSIRHIILYSNNSPCNEANHCCIS
KMYNFLITYPGITLSIYFSQLYHTEMDFPASAWNREALRSLASLWPRVVLSPISGGIWHSVLHSFISG
VSGSHVFQPILTGRALADRHNAYEINAITGVKPYFTDVLLQTKRNPNTKAQEALESYPLNNAFPGQFF
QMPSGQLQPNLPPDLRAPVVFVLVPLRDLPPMHMGQNPNKPRNIVRHLNMPQMSFQETKDLGRLPTGR
SVEIVEITEQFASSKEADEKKKKKGKK
mAPOBEC-4 (Mus musculus):
MDSLLMKQKKFLYHFKNVRWAKGRHETYLCYVVKRRDSATSCSLDFGHLRNKSGCHVELLFLRYISDW
DLDPGRCYRVTWFTSWSPCYDCARHVAEFLRWNPNLSLRIFTARLYFCEDRKAEPEGLRRLHRAGVQI
GIMTFKDYFYCWNTFVENRERTFKAWEGLHENSVRLTRQLRRILLPLYEVDDLRDAFRMLGF
rAPOBEC-4 (Rattus norvegicus):
MEPLYEEYLTHSGTIVKPYYWLSVSLNCTNCPYHIRTGEEARVPYTEFHQTFGFPWSTYPQTKHLTFY
ELRSSSGNLIQKGLASNCTGSHTHPESMLFERDGYLDSLIFHDSNIRHIILYSNNSPCDEANHCCISK
MYNFLMNYPEVTLSVFFSQLYHTENQFPTSAWNREALRGLASLWPQVTLSAISGGIWQSILETFVSGI
SEGLTAVRPFTAGRTLTDRYNAYEINCITEVKPYFTDALHSWQKENQDQKVWAASENQPLHNTTPAQW
QPDMSQDCRTPAVFMLVPYRDLPPIHVNPSPQKPRTVVRHLNTLQLSASKVKALRKSPSGRPVKKEEA
RKGSTRSQEANETNKSKWKKQTLFIKSNICHLLEREQKKIGILSSWSV
mfAPOBEC-4 (Macaca fascicularis):
MEPTYEEYLANHGTIVKPYYWLSFSLDCSNCPYHIRTGEEARVSLTEFCQIFGFPYGTTYPQTKHLTF
YELKTSSGSLVQKGHASSCTGNYIHPESMLFEMNGYLDSAIYNNDSIRHIILYCNNSPCNEANHCCIS
KVYNFLITYPGITLSIYFSQLYHTEMDFPASAWNREALRSLASLWPRVVLSPISGGIWHSVLHSFVSG
VSGSHVFQPILTGRALTDRYNAYEINAITGVKPFFTDVLLHTKRNPNTKAQMALESYPLNNAFPGQSF
QMTSGIPPDLRAPVVFVLLPLRDLPPMHMGQDPNKPRNIIRHLNMPQMSFQETKDLERLPTRRSVETV
EITERFASSKQAEEKTKKKKGKK
pmCDA-1 (Petromyzon marinus):
MAGYECVRVSEKLDFDTFEFQFENLHYATERHRTYVIFDVKPQSAGGRSRRLWGYIINNPNVCHAELI
LMSMIDRHLESNPGVYAMTWYMSWSPCANCSSKLNPWLKNLLEEQGHTLTMHFSRIYDRDREGDHRGL
RGLKHVSNSFRMGVVGRAEVKECLAEYVEASRRTLTWLDTTESMAAKMRRKLFCILVRCAGMRESGIP
LHLFTLQTPLLSGRVVWWRV
pmCDA-2 (Petromyzon marinus):
MELREVVDCALASCVRHEPLSRVAFLRCFAAPSQKPRGTVILFYVEGAGRGVTGGHAVNYNKQGTSIH
AEVLLLSAVRAALLRRRRCEDGEEATRGCTLHCYSTYSPCRDCVEYIQEFGASTGVRVVIHCCRLYEL
DVNRRRSEAEGVLRSLSRLGRDFRLMGPRDAIALLLGGRLANTADGESGASGNAWVTETNVVEPLVDM
TGFGDEDLHAQVQRNKQIREAYANYASAVSLMLGELHVDPDKFPFLAEFLAQTSVEPSGTPRETRGRP
RGASSRGPEIGRQRPADFERALGAYGLFLHPRIVSREADREEIKRDLIVVMRKHNYQGP
pmCDA-5 (Petromyzon marinus):
MAGDENVRVSEKLDFDTFEFQFENLHYATERHRTYVIFDVKPQSAGGRSRRLWGYIINNPNVCHAELI
LMSMIDRHLESNPGVYAMTWYMSWSPCANCSSKLNPWLKNLLEEQGHTLMMHFSRIYDRDREGDHRGL
RGLKHVSNSFRMGVVGRAEVKECLAEYVEASRRTLTWLDTTESMAAKMRRKLFCILVRCAGMRESGMP
LHLFT
yCD (Saccharomyces cerevisiae):
MVTGGMASKWDQKGMDIAYEEAALGYKEGGVPIGGCLINNKDGSVLGRGHNMRFQKGSATLHGEISTL
ENCGRLEGKVYKDTTLYTTLSPCDMCTGAIIMYGIPRCVVGENVNFKSKGEKYLQTRGHEVVVVDDER
CKKIMKQFIDERPQDWFEDIGE
rAPOBEC-1 (delta 177-186):
MSSETGPVAVDPTLRRRIEPHEFEVFFDPRELRKETCLLYEINWGGRHSIWRHTSQNTNKHVEVNFIE
KFTTERYFCPNTRCSITWFLSWSPCGECSRAITEFLSRYPHVTLFIYIARLYHHADPRNRQGLRDLIS
SGVTIQIMTEQESGYCWRNFVNYSPSNEAHWPRYPHLWVRGLPPCLNILRRKQPQLTFFTIALQSCHY
QRLPPHILWATGLK
rAPOBEC-1 (delta 202-213):
MSSETGPVAVDPTLRRRIEPHEFEVFFDPRELRKETCLLYEINWGGRHSIWRHTSQNTNKHVEVNFIE
KFTTERYFCPNTRCSITWFLSWSPCGECSRAITEFLSRYPHVTLFIYIARLYHHADPRNRQGLRDLIS
SGVTIQIMTEQESGYCWRNFVNYSPSNEAHWPRYPHLWVRLYVLELYCIILGLPPCLNILRRKQPQHY
QRLPPHILWATGLK
Mouse APOBEC-3:
MGPFCLGCSHRKCYSPIRNLISQETFKFHFKNLGYAKGRKDTFLCYEVTRKDCDSPVSLHHG
VFKNKDNIHAEICFLYWFHDKVLKVLSPREEFKITWYMSWSPCFECAEQIVRFLATHHNLSL
DIFSSRLYNVQDPETQQNLCRLVQEGAQVAAMDLYEFKKCWKKFVDNGGRRFRPWKRLLTNF
RYQDSKLQEILRPCYIPVPSSSSSTLSNICLTKGLPETRFCVEGRRMDPLSEEEFYSQFYNQ
RVKHLCYYHRMKPYLCYQLEQFNGQAPLKGCLLSEKGKQHAEILFLDKIRSMELSQVTITCY
LTWSPCPNCAWQLAAFKRDRPDLILHIYTSRLYFHWKRPFQKGLCSLWQSGILVDVMDLPQF
TDCWTNFVNPKRPFWPWKGLEIISRRTQRRLRRIKESWGLQDLVNDFGNLQLGPPMS

(italic: nucleic acid editing domain)

[0546] Some aspects of the present disclosure are based on the recognition that modulating the deaminase domain catalytic activity of any of the fusion proteins described herein, for example by making point mutations in the deaminase domain, affect the processivity of the fusion proteins (e.g., base editors). For example, mutations that reduce, but do not eliminate, the catalytic activity of a deaminase domain within a base editing fusion protein can make it less likely that the deaminase domain will catalyze the deamination of a residue adjacent to a target residue, thereby narrowing the deamination window. The ability to narrow the deamination window can prevent unwanted deamination of residues adjacent to specific target residues, which can decrease or prevent off-target effects.

[0547] For example, in some embodiments, an APOBEC deaminase incorporated into a base editor can comprise one or more mutations selected from the group consisting of H121X, H122X, R126X, R126X, R118X, W90X, W90X, and R132X of rAPOBEC1, or one or more corresponding mutations in another APOBEC deaminase, wherein X is any amino acid. In some embodiments, an APOBEC deaminase incorporated into a base editor can comprise one or more mutations selected from the group consisting of H121R, H122R, R126A, R126E, R118A, W90A, W90Y, and R132E of rAPOBEC1, or one or more corresponding mutations in another APOBEC deaminase.

[0548] In some embodiments, an APOBEC deaminase incorporated into a base editor can comprise one or more mutations selected from the group consisting of D316X, D317X, R320X, R320X, R313X, W285X, W285X, R326X of hAPOBEC3G, or one or more corresponding mutations in another APOBEC deaminase, wherein X is any amino acid. In some embodiments, any of the fusion proteins provided herein comprise an APOBEC deaminase comprising one or more mutations selected from the group consisting of D316R, D317R, R320A, R320E, R313A, W285A, W285Y, R326E of hAPOBEC3G, or one or more corresponding mutations in another APOBEC deaminase.

[0549] In some embodiments, an APOBEC deaminase incorporated into a base editor can comprise a H121R and a H122R mutation of rAPOBEC1, or one or more corresponding mutations in another APOBEC deaminase. In some embodiments an APOBEC deaminase incorporated into a base editor can comprise an APOBEC deaminase comprising a R126A mutation of rAPOBEC1, or one or more corresponding mutations in another APOBEC deaminase. In some embodiments, an APOBEC deaminase incorporated into a base editor can comprise an APOBEC deaminase comprising a R126E mutation of rAPOBEC1, or one or more corresponding mutations in another APOBEC deaminase. In some embodiments, an APOBEC deaminase incorporated into a base editor can comprise an APOBEC deaminase comprising a R118A mutation of rAPOBEC1, or one or more corresponding mutations in another APOBEC deaminase. In some embodiments, an APOBEC deaminase incorporated into a base editor can comprise an APOBEC deaminase comprising a W90A mutation of rAPOBEC1, or one or more corresponding mutations in another APOBEC deaminase. In some embodiments, an APOBEC deaminase incorporated into a base editor can comprise an APOBEC deaminase comprising a W90Y mutation of rAPOBEC1, or one or more corresponding mutations in another APOBEC deaminase. In some embodiments, an APOBEC deaminase incorporated into a base editor can comprise an APOBEC deaminase comprising a R132E mutation of rAPOBEC1, or one or more corresponding mutations in another APOBEC deaminase. In some embodiments an APOBEC deaminase incorporated into a base editor can comprise an APOBEC deaminase comprising a W90Y and a R126E mutation of rAPOBEC1, or one or more corresponding mutations in another APOBEC deaminase. In some embodiments, an APOBEC deaminase incorporated into a base editor can comprise an APOBEC deaminase comprising a R126E and a R132E mutation of rAPOBEC1, or one or more corresponding mutations in another APOBEC deaminase. In some embodiments, an APOBEC deaminase incorporated into a base editor can comprise an APOBEC deaminase comprising a W90Y and a R132E mutation of rAPOBEC1, or one or more corresponding mutations in another APOBEC deaminase. In some embodiments, an APOBEC deaminase incorporated into a base editor can comprise an APOBEC deaminase comprising a W90Y, R126E, and R132E mutation of rAPOBEC1, or one or more corresponding mutations in another APOBEC deaminase.

[0550] In some embodiments, an APOBEC deaminase incorporated into a base editor can comprise an APOBEC deaminase comprising a D316R and a D317R mutation of hAPOBEC3G, or one or more corresponding mutations in another APOBEC deaminase. In some embodiments, any of the fusion proteins provided herein comprise an APOBEC deaminase comprising a R320A mutation of hAPOBEC3G, or one or more corresponding mutations in another APOBEC deaminase. In some embodiments, an APOBEC deaminase incorporated into a base editor can comprise an APOBEC deaminase comprising a R320E mutation of hAPOBEC3G, or one or more corresponding mutations in another APOBEC deaminase. In some embodiments, an APOBEC deaminase incorporated into a base editor can comprise an APOBEC deaminase comprising a R313A mutation of hAPOBEC3G, or one or more corresponding mutations in another APOBEC deaminase. In some embodiments, an APOBEC deaminase incorporated into a base editor can comprise an APOBEC deaminase comprising a W285A mutation of hAPOBEC3G, or one or more corresponding mutations in another APOBEC deaminase. In some embodiments, an APOBEC deaminase incorporated into a base editor can comprise an APOBEC deaminase comprising a W285Y mutation of hAPOBEC3G, or one or more corresponding mutations in another APOBEC deaminase. In some embodiments, an APOBEC deaminase incorporated into a base editor can comprise an APOBEC deaminase comprising a R326E mutation of hAPOBEC3G, or one or more corresponding mutations in another APOBEC deaminase. In some embodiments, an APOBEC deaminase incorporated into a base editor can comprise an APOBEC deaminase comprising a W285Y and a R320E mutation of hAPOBEC3G, or one or more corresponding mutations in another APOBEC deaminase. In some embodiments, an APOBEC deaminase incorporated into a base editor can comprise an APOBEC deaminase comprising a R320E and a R326E mutation of hAPOBEC3G, or one or more corresponding mutations in another APOBEC deaminase. In some embodiments, an APOBEC deaminase incorporated into a base editor can comprise an APOBEC deaminase comprising a W285Y and a R326E mutation of hAPOBEC3G, or one or more corresponding mutations in another APOBEC deaminase. In some embodiments, an APOBEC deaminase incorporated into a base editor can comprise an APOBEC deaminase comprising a W285Y, R320E, and R326E mutation of hAPOBEC3G, or one or more corresponding mutations in another APOBEC deaminase.

[0551] A number of modified cytidine deaminases are commercially available, including, but not limited to, SaBE3, SaKKH-BE3, VQR-BE3, EQR-BE3, VRER-BE3, YE1-BE3, EE-BE3, YE2-BE3, and YEE-BE3, which are available from Addgene (plasmids 85169, 85170, 85171, 85172, 85173, 85174, 85175, 85176, 85177). In some embodiments, a deaminase incorporated into a base editor comprises all or a portion of an APOBEC1 deaminase.

[0552] Details of C to T nucleobase editing proteins are described in International PCT Application No. PCT/US2016/058344 (WO2017/070632) and Komor, A. C., et al., “Programmable editing of a target base in genomic DNA without double-stranded DNA cleavage” Nature 533, 420-424 (2016), the entire contents of which are hereby incorporated by reference.

### Cytidine Deaminases

[0553] The fusion proteins provided herein comprise a cytidine deaminase. In some embodiments, the cytidine deaminases provided herein are capable of deaminating cytosine or 5-methylcytosine to uracil or thymine. In some embodiments, the cytidine deaminases provided herein are capable of deaminating cytosine in DNA. The cytidine deaminase may be derived from any suitable organism. In some embodiments, the cytidine deaminase is a naturally-occurring cytidine deaminase that includes one or more mutations corresponding to any of the mutations provided herein. One of skill in the art will be able to identify the corresponding residue in any homologous protein, e.g., by sequence alignment and determination of homologous residues. Accordingly, one of skill in the art would be able to generate mutations in any naturally-occurring cytidine deaminase that corresponds to any of the mutations described herein. In some embodiments, the cytidine deaminase is from a prokaryote. In some embodiments, the cytidine deaminase is from a bacterium. In some embodiments, the cytidine deaminase is from a mammal (e.g., human).

[0554] In some embodiments, the cytidine deaminase comprises an amino acid sequence that is at least 60%, at least 65%, at least 70%, at least 75%, at least 80%, at least 85%, at least 90%, at least 95%, at least 96%, at least 97%, at least 98%, at least 99%, or at least 99.5% identical to any one of the cytidine deaminase amino acid sequences set forth herein. It should be appreciated that cytidine deaminases provided herein may include one or more mutations (e.g., any of the mutations provided herein). The disclosure provides any deaminase domains with a certain percent identity plus any of the mutations or combinations thereof described herein. In some embodiments, the cytidine deaminase comprises an amino acid sequence that has 1, 2, 3, 4, 5, 6, 7, 8, 9, 10, 11, 12, 13, 14, 15, 16, 17, 18, 19, 20, 21, 22, 21, 24, 25, 26, 27, 28, 29, 30, 31, 32, 33, 34, 35, 36, 37, 38, 39, 40, 41, 42, 43, 44, 45, 46, 47, 48, 49, 50, or more mutations compared to a reference sequence, or any of the cytidine deaminases provided herein. In some embodiments, the cytidine deaminase comprises an amino acid sequence that has at least 5, at least 10, at least 15, at least 20, at least 25, at least 30, at least 35, at least 40, at least 45, at least 50, at least 60, at least 70, at least 80, at least 90, at least 100, at least 110, at least 120, at least 130, at least 140, at least 150, at least 160, or at least 170 identical contiguous amino acid residues as compared to any one of the amino acid sequences known in the art or described herein.

[0555] A fusion protein of the invention comprises two or more nucleic acid editing domains. In some embodiments, the nucleic acid editing domain can catalyze a C to U base change. In some embodiments, the nucleic acid editing domain is a deaminase domain. In some embodiments, the deaminase is a cytidine deaminase or an adenosine deaminase. In some embodiments, the deaminase is an apolipoprotein B mRNA-editing complex (APOBEC) family deaminase. In some embodiments, the deaminase is an APOBEC1 deaminase. In some embodiments, the deaminase is an APOBEC2 deaminase. In some embodiments, the deaminase is an APOBEC3 deaminase. In some embodiments, the deaminase is an APOBEC3 A deaminase. In some embodiments, the deaminase is an APOBEC3B deaminase. In some embodiments, the deaminase is an APOBEC3C deaminase. In some embodiments, the deaminase is an APOBEC3D deaminase. In some embodiments, the deaminase is an APOBEC3E deaminase. In some embodiments, the deaminase is an APOBEC3F deaminase. In some embodiments, the deaminase is an APOBEC3G deaminase. In some embodiments, the deaminase is an APOBEC3H deaminase. In some embodiments, the deaminase is an APOBEC4 deaminase. In some embodiments, the deaminase is an activation-induced deaminase (AID). In some embodiments, the deaminase is a vertebrate deaminase. In some embodiments, the deaminase is an invertebrate deaminase. In some embodiments, the deaminase is a human, chimpanzee, gorilla, monkey, cow, dog, rat, or mouse deaminase. In some embodiments, the deaminase is a human deaminase. In some embodiments, the deaminase is a rat deaminase, e.g., rAPOBEC1. In some embodiments, the deaminase is a Petromyzon marinus cytidine deaminase 1 (pmCDA1). In some embodiments, the deaminase is a human APOBEC3G. In some embodiments, the deaminase is a fragment of the human APOBEC3G. In some embodiments, the deaminase is a human APOBEC3G variant comprising a D316R D317R mutation. In some embodiments, the deaminase is a fragment of the human APOBEC3G and comprises mutations corresponding to the D316R D317R mutations. In some embodiments, the nucleic acid editing domain is at least 80%, at least 85%, at least 90%, at least 92%, at least 95%, at least 96%, at least 97%, at least 98%, at least 99%), or at least 99.5% identical to the deaminase domain of any deaminase described herein.

[0556] In certain embodiments, the fusion proteins provided herein comprise one or more features that improve the base editing activity of the fusion proteins. For example, any of the fusion proteins provided herein may comprise a Cas9 domain that has reduced nuclease activity. In some embodiments, any of the fusion proteins provided herein may have a Cas9 domain that does not have nuclease activity (dCas9), or a Cas9 domain that cuts one strand of a duplexed DNA molecule, referred to as a Cas9 nickase (nCas9).

Cas9 Complexes with Guide RNAs

[0557] Some aspects of this disclosure provide complexes comprising any of the fusion proteins provided herein, and a guide RNA bound to a Cas9 domain (e.g., a dCas9, a nuclease active Cas9, or a Cas9 nickase) of fusion protein. In some embodiments, the guide nucleic acid (e.g., guide RNA) is from 15-100 nucleotides long and comprises a sequence of at least 10 contiguous nucleotides that is complementary to a target sequence. In some embodiments, the guide RNA is 15, 16, 17, 18, 19, 20, 21, 22, 23, 24, 25, 26, 27, 28, 29, 30, 31, 32, 33, 34, 35, 36, 37, 38, 39, 40, 41, 42, 43, 44, 45, 46, 47, 48, 49, or 50 nucleotides long. In some embodiments, the guide RNA comprises a sequence of 15, 16, 17, 18, 19, 20, 21, 22, 23, 24, 25, 26, 27, 28, 29, 30, 31, 32, 33, 34, 35, 36, 37, 38, 39, or 40 contiguous nucleotides that is complementary to a target sequence. In some embodiments, the target sequence is a DNA sequence. In some embodiments, the target sequence is a sequence in the genome of a bacteria, yeast, fungi, insect, plant, or animal. In some embodiments, the target sequence is a sequence in the genome of a human. In some embodiments, the 3′ end of the target sequence is immediately adjacent to a canonical PAM sequence (NGG). In some embodiments, the 3′ end of the target sequence is immediately adjacent to a non-canonical PAM sequence (e.g., a sequence listed in Table 1 or 5′-NAA-3′). In some embodiments, the guide nucleic acid (e.g., guide RNA) is complementary to a sequence in a gene of interest (e.g., a gene associated with a disease or disorder).

[0558] Some aspects of this disclosure provide methods of using the fusion proteins, or complexes provided herein. For example, some aspects of this disclosure provide methods comprising contacting a DNA molecule with any of the fusion proteins provided herein, and with at least one guide RNA, wherein the guide RNA is about 15-100 nucleotides long and comprises a sequence of at least 10 contiguous nucleotides that is complementary to a target sequence. In some embodiments, the 3′ end of the target sequence is immediately adjacent to an AGC, GAG, TTT, GTG, or CAA sequence. In some embodiments, the 3′ end of the target sequence is immediately adjacent to an NGA, NGCG, NGN, NNGRRT, NNNRRT, NGCG, NGCN, NGTN, NGTN, NGTN, or 5′ (TTTV) sequence.

[0559] It will be understood that the numbering of the specific positions or residues in the respective sequences depends on the particular protein and numbering scheme used. Numbering might be different, e.g., in precursors of a mature protein and the mature protein itself, and differences in sequences from species to species may affect numbering. One of skill in the art will be able to identify the respective residue in any homologous protein and in the respective encoding nucleic acid by methods well known in the art, e.g., by sequence alignment and determination of homologous residues.

[0560] It will be apparent to those of skill in the art that in order to target any of the fusion proteins disclosed herein, to a target site, e.g., a site comprising a mutation to be edited, it is typically necessary to co-express the fusion protein together with a guide RNA. As explained in more detail elsewhere herein, a guide RNA typically comprises a tracrRNA framework allowing for Cas9 binding, and a guide sequence, which confers sequence specificity to the Cas9:nucleic acid editing enzyme/domain fusion protein. Alternatively, the guide RNA and tracrRNA may be provided separately, as two nucleic acid molecules. In some embodiments, the guide RNA comprises a structure, wherein the guide sequence comprises a sequence that is complementary to the target sequence. The guide sequence is typically 20 nucleotides long. The sequences of suitable guide RNAs for targeting Cas9:nucleic acid editing enzyme/domain fusion proteins to specific genomic target sites will be apparent to those of skill in the art based on the instant disclosure. Such suitable guide RNA sequences typically comprise guide sequences that are complementary to a nucleic sequence within 50 nucleotides upstream or downstream of the target nucleotide to be edited. Some exemplary guide RNA sequences suitable for targeting any of the provided fusion proteins to specific target sequences are provided herein.

### Additional Domains

[0561] A base editor described herein can include any domain which helps to facilitate the nucleobase editing, modification or altering of a nucleobase of a polynucleotide. In some embodiments, a base editor comprises a polynucleotide programmable nucleotide binding domain (e.g., Cas9), a nucleobase editing domain (e.g., deaminase domain), and one or more additional domains. In some cases, the additional domain can facilitate enzymatic or catalytic functions of the base editor, binding functions of the base editor, or be inhibitors of cellular machinery (e.g., enzymes) that could interfere with the desired base editing result. In some embodiments, a base editor can comprise a nuclease, a nickase, a recombinase, a deaminase, a methyltransferase, a methylase, an acetylase, an acetyltransferase, a transcriptional activator, or a transcriptional repressor domain.

[0562] In some embodiments, a base editor can comprise a uracil glycosylase inhibitor (UGI) domain. A UGI domain can for example improve the efficiency of base editors comprising a cytidine deaminase domain by inhibiting the conversion of a U formed by deamination of a C back to the C nucleobase. In some cases, cellular DNA repair response to the presence of U:G heteroduplex DNA can be responsible for a decrease in nucleobase editing efficiency in cells. In such cases, uracil DNA glycosylase (UDG) can catalyze removal of U from DNA in cells, which can initiate base excision repair (BER), mostly resulting in reversion of the U:G pair to a C:G pair. In such cases, BER can be inhibited in base editors comprising one or more domains that bind the single strand, block the edited base, inhibit UGI, inhibit BER, protect the edited base, and/or promote repairing of the non-edited strand. Thus, this disclosure contemplates a base editor fusion protein comprising a UGI domain.

[0563] In some embodiments, a base editor comprises as a domain all or a portion of a double-strand break (DSB) binding protein. For example, a DSB binding protein can include a Gam protein of bacteriophage Mu that can bind to the ends of DSBs and can protect them from degradation. See Komor, A. C., et al., “Improved base excision repair inhibition and bacteriophage Mu Gam protein yields C:G-to-T:A base editors with higher efficiency and product purity” Science Advances 3:eaao4774 (2017), the entire content of which is hereby incorporated by reference.

[0564] Additionally, in some embodiments, a Gam protein can be fused to an N terminus of a base editor. In some embodiments, a Gam protein can be fused to a C-terminus of a base editor. The Gam protein of bacteriophage Mu can bind to the ends of double strand breaks (DSBs) and protect them from degradation. In some embodiments, using Gam to bind the free ends of DSB can reduce indel formation during the process of base editing. In some embodiments, 174-residue Gam protein is fused to the N terminus of the base editors. See. Komor, A. C., et al., “Improved base excision repair inhibition and bacteriophage Mu Gam protein yields C:G-to-T:A base editors with higher efficiency and product purity” Science Advances 3:eaao4774 (2017). In some embodiments, a mutation or mutations can change the length of a base editor domain relative to a wild-type domain. For example, a deletion of at least one amino acid in at least one domain can reduce the length of the base editor. In another case, a mutation or mutations do not change the length of a domain relative to a wild-type domain. For example, substitution(s) in any domain does/do not change the length of the base editor.

[0565] In some embodiments, a base editor can comprise as a domain all or a portion of a nucleic acid polymerase (NAP). For example, a base editor can comprise all or a portion of a eukaryotic NAP. In some embodiments, a NAP or portion thereof incorporated into a base editor is a DNA polymerase. In some embodiments, a NAP or portion thereof incorporated into a base editor has translesion polymerase activity. In some cases, a NAP or portion thereof incorporated into a base editor is a translesion DNA polymerase. In some embodiments, a NAP or portion thereof incorporated into a base editor is a Rev7, Rev1 complex, polymerase iota, polymerase kappa, or polymerase eta. In some embodiments, a NAP or portion thereof incorporated into a base editor is a eukaryotic polymerase alpha, beta, gamma, delta, epsilon, gamma, eta, iota, kappa, lambda, mu, or nu component. In some embodiments, a NAP or portion thereof incorporated into a base editor comprises an amino acid sequence that is at least 75%, 80%, 85%, 90%, 95%, 96%, 97%, 98%, 99%, or 99.5% identical to a nucleic acid polymerase (e.g., a translesion DNA polymerase).

### Base Editor System

[0566] The base editor system provided herein comprises the steps of: (a) contacting a target nucleotide sequence of a polynucleotide (e.g., a double-stranded DNA or RNA, a single-stranded DNA or RNA) of a subject with a base editor system comprising an adenosine deaminase domain or a cytidine deaminase domain, wherein the aforementioned domains are fused to a polynucleotide binding domain, thereby forming a nucleobase editor capable of inducing changes at one or more bases within a nucleic acid molecule as described herein and at least one guide polynucleic acid (e.g., gRNA), wherein the target nucleotide sequence comprises a targeted nucleobase pair; (b) inducing strand separation of the target region; (c) converting a first nucleobase of the target nucleobase pair in a single strand of the target region to a second nucleobase; and (d) cutting no more than one strand of the target region, where a third nucleobase complementary to the first nucleobase base is replaced by a fourth nucleobase complementary to the second nucleobase. It should be appreciated that in some embodiments, step (b) is omitted. In some embodiments, the targeted nucleobase pair is a plurality of nucleobase pairs in one or more genes. In some embodiments, the base editor system provided herein is capable of multiplex editing of a plurality of nucleobase pairs in one or more genes. In some embodiments, the plurality of nucleobase pairs is located in the same gene. In some embodiments, the plurality of nucleobase pairs is located in one or more genes, wherein at least one gene is located in a different locus.

[0567] In some embodiments, the cut single strand (nicked strand) is hybridized to the guide nucleic acid. In some embodiments, the cut single strand is opposite to the strand comprising the first nucleobase. In some embodiments, the base editor comprises a Cas9 domain. In some embodiments, the first base is adenine, and the second base is not a G, C, A, or T. In some embodiments, the second base is inosine.

[0568] Base editing system as provided herein provides a new approach to genome editing that uses a fusion protein containing a catalytically defective Streptococcus pyogenes Cas9, a cytidine deaminase, and an inhibitor of base excision repair to induce programmable, single nucleotide (C→T or A→G) changes in DNA without generating double-strand DNA breaks, without requiring a donor DNA template, and without inducing an excess of stochastic insertions and deletions.

[0569] Provided herein are systems, compositions, and methods for editing a nucleobase using a base editor system. In some embodiments, the base editor system comprises a base editor (BE) comprising a polynucleotide programmable nucleotide binding domain and a nucleobase editing domain (e.g., deaminase domain) for editing the nucleobase; and a guide polynucleotide (e.g., guide RNA) in conjunction with the polynucleotide programmable nucleotide binding domain. In some embodiments, the base editor system comprises a base editor (BE) comprising a polynucleotide programmable nucleotide binding domain and a nucleobase editing domain (e.g., deaminase domain) for editing the nucleobase, and a guide polynucleotide (e.g., guide RNA) in conjunction with the polynucleotide programmable nucleotide binding domain. In some embodiments, the polynucleotide programmable nucleotide binding domain is a polynucleotide programmable DNA binding domain. In some embodiments, the polynucleotide programmable nucleotide binding domain is a polynucleotide programmable RNA binding domain. In some cases, a deaminase domain can be a cytosine deaminase or a cytidine deaminase, an adenine deaminase or an adenosine deaminase. In some embodiments, the terms “cytosine deaminase” and “cytidine deaminase” can be used interchangeably. In some embodiments, the terms “adenine deaminase” and “adenosine deaminase” can be used interchangeably. In some cases, a deaminase domain can be a cytosine deaminase or a cytidine deaminase. In some cases, a deaminase domain can be an adenine deaminase or an adenosine deaminase. Details of nucleobase editing proteins are described in International PCT Application Nos. PCT/2017/045381 (WO2018/027078) and PCT/US2016/058344 (WO2017/070632), each of which is incorporated herein by reference for its entirety. Also see Komor, A. C., et al., “Programmable editing of a target base in genomic DNA without double-stranded DNA cleavage” Nature 533, 420-424 (2016); Gaudelli, N. M., et al., “Programmable base editing of A•T to G•C in genomic DNA without DNA cleavage” Nature 551, 464-471 (2017); and Komor, A. C., et al., “Improved base excision repair inhibition and bacteriophage Mu Gam protein yields C:G-to-T:A base editors with higher efficiency and product purity” Science Advances 3:eaao4774 (2017), the entire contents of which are hereby incorporated by reference.

[0570] In some embodiments, a single guide polynucleotide may be utilized to target a deaminase to a target nucleic acid sequence. In some embodiments, a single pair of guide polynucleotides may be utilized to target different deaminases to a target nucleic acid sequence.

[0571] The nucleobase components and the polynucleotide programmable nucleotide binding component of a base editor system may be associated with each other covalently or non-covalently. For example, in some embodiments, the deaminase domain can be targeted to a target nucleotide sequence by a polynucleotide programmable nucleotide binding domain. In some embodiments, a polynucleotide programmable nucleotide binding domain can be fused or linked to a deaminase domain. In some embodiments, a polynucleotide programmable nucleotide binding domain can target a deaminase domain to a target nucleotide sequence by non-covalently interacting with or associating with the deaminase domain. For example, in some embodiments, the nucleobase editing component, e.g., the deaminase component can comprise an additional heterologous portion or domain that is capable of interacting with, associating with, or capable of forming a complex with an additional heterologous portion or domain that is part of a polynucleotide programmable nucleotide binding domain. In some embodiments, the additional heterologous portion may be capable of binding to, interacting with, associating with, or forming a complex with a polypeptide. In some embodiments, the additional heterologous portion may be capable of binding to, interacting with, associating with, or forming a complex with a polynucleotide. In some embodiments, the additional heterologous portion may be capable of binding to a guide polynucleotide. In some embodiments, the additional heterologous portion may be capable of binding to a polypeptide linker. In some embodiments, the additional heterologous portion may be capable of binding to a polynucleotide linker. The additional heterologous portion may be a protein domain. In some embodiments, the additional heterologous portion may be a K Homology (KH) domain, a MS2 coat protein domain, a PP7 coat protein domain, a SfMu Com coat protein domain, a steril alpha motif, a telomerase Ku binding motif and Ku protein, a telomerase Sm7 binding motif and Sm7 protein, or a RNA recognition motif.

[0572] A base editor system may further comprise a guide polynucleotide component. It should be appreciated that components of the base editor system may be associated with each other via covalent bonds, noncovalent interactions, or any combination of associations and interactions thereof. In some embodiments, a deaminase domain can be targeted to a target nucleotide sequence by a guide polynucleotide. For example, in some embodiments, the nucleobase editing component of the base editor system, e.g., the deaminase component, can comprise an additional heterologous portion or domain (e.g., polynucleotide binding domain such as an RNA or DNA binding protein) that is capable of interacting with, associating with, or capable of forming a complex with a portion or segment (e.g., a polynucleotide motif) of a guide polynucleotide. In some embodiments, the additional heterologous portion or domain (e.g., polynucleotide binding domain such as an RNA or DNA binding protein) can be fused or linked to the deaminase domain. In some embodiments, the additional heterologous portion may be capable of binding to, interacting with, associating with, or forming a complex with a polypeptide. In some embodiments, the additional heterologous portion may be capable of binding to, interacting with, associating with, or forming a complex with a polynucleotide. In some embodiments, the additional heterologous portion may be capable of binding to a guide polynucleotide. In some embodiments, the additional heterologous portion may be capable of binding to a polypeptide linker. In some embodiments, the additional heterologous portion may be capable of binding to a polynucleotide linker. The additional heterologous portion may be a protein domain. In some embodiments, the additional heterologous portion may be a K Homology (KH) domain, a MS2 coat protein domain, a PP7 coat protein domain, a SfMu Com coat protein domain, a sterile alpha motif, a telomerase Ku binding motif and Ku protein, a telomerase Sm7 binding motif and Sm7 protein, or a RNA recognition motif.

[0573] In some embodiments, a base editor system can further comprise an inhibitor of base excision repair (BER) component. It should be appreciated that components of the base editor system may be associated with each other via covalent bonds, noncovalent interactions, or any combination of associations and interactions thereof. The inhibitor of BER component may comprise a base excision repair inhibitor. In some embodiments, the inhibitor of base excision repair can be a uracil DNA glycosylase inhibitor (UGI). In some embodiments, the inhibitor of base excision repair can be an inosine base excision repair inhibitor. In some embodiments, the inhibitor of base excision repair can be targeted to the target nucleotide sequence by the polynucleotide programmable nucleotide binding domain. In some embodiments, a polynucleotide programmable nucleotide binding domain can be fused or linked to an inhibitor of base excision repair. In some embodiments, a polynucleotide programmable nucleotide binding domain can be fused or linked to a deaminase domain and an inhibitor of base excision repair. In some embodiments, a polynucleotide programmable nucleotide binding domain can target an inhibitor of base excision repair to a target nucleotide sequence by non-covalently interacting with or associating with the inhibitor of base excision repair. For example, in some embodiments, the inhibitor of base excision repair component can comprise an additional heterologous portion or domain that is capable of interacting with, associating with, or capable of forming a complex with an additional heterologous portion or domain that is part of a polynucleotide programmable nucleotide binding domain. In some embodiments, the inhibitor of base excision repair can be targeted to the target nucleotide sequence by the guide polynucleotide. For example, in some embodiments, the inhibitor of base excision repair can comprise an additional heterologous portion or domain (e.g., polynucleotide binding domain such as an RNA or DNA binding protein) that is capable of interacting with, associating with, or capable of forming a complex with a portion or segment (e.g., a polynucleotide motif) of a guide polynucleotide. In some embodiments, the additional heterologous portion or domain of the guide polynucleotide (e.g., polynucleotide binding domain such as an RNA or DNA binding protein) can be fused or linked to the inhibitor of base excision repair. In some embodiments, the additional heterologous portion may be capable of binding to, interacting with, associating with, or forming a complex with a polynucleotide. In some embodiments, the additional heterologous portion may be capable of binding to a guide polynucleotide. In some embodiments, the additional heterologous portion may be capable of binding to a polypeptide linker. In some embodiments, the additional heterologous portion may be capable of binding to a polynucleotide linker. The additional heterologous portion may be a protein domain. In some embodiments, the additional heterologous portion may be a K Homology (KH) domain, a MS2 coat protein domain, a PP7 coat protein domain, a SfMu Com coat protein domain, a sterile alpha motif, a telomerase Ku binding motif and Ku protein, a telomerase Sm7 binding motif and Sm7 protein, or a RNA recognition motif.

[0574] In some embodiments, the base editor inhibits base excision repair of the edited strand. In some embodiments, the base editor protects or binds the non-edited strand. In some embodiments, the base editor comprises UGI activity. In some embodiments, the base editor comprises a catalytically inactive inosine-specific nuclease. In some embodiments, the base editor comprises nickase activity. In some embodiments, the intended edit of base pair is upstream of a PAM site. In some embodiments, the intended edit of base pair is 1, 2, 3, 4, 5, 6, 7, 8, 9, 10, 11, 12, 13, 14, 15, 16, 17, 18, 19, or 20 nucleotides upstream of the PAM site. In some embodiments, the intended edit of base-pair is downstream of a PAM site. In some embodiments, the intended edited base pair is 1, 2, 3, 4, 5, 6, 7, 8, 9, 10, 11, 12, 13, 14, 15, 16, 17, 18, 19, or 20 nucleotides downstream stream of the PAM site.

[0575] In some embodiments, the method does not require a canonical (e.g., NGG) PAM site. In some embodiments, the nucleobase editor comprises a linker or a spacer. In some embodiments, the linker or spacer is 1-25 amino acids in length. In some embodiments, the linker or spacer is 5-20 amino acids in length. In some embodiments, the linker or spacer is 10, 11, 12, 13, 14, 15, 16, 17, 18, 19, or 20 amino acids in length.

[0576] In some embodiments, the target region comprises a target window, wherein the target window comprises the target nucleobase pair. In some embodiments, the target window comprises 1-10 nucleotides. In some embodiments, the target window is 1, 2, 3, 4, 5, 6, 7, 8, 9, 10, 11, 12, 13, 14, 15, 16, 17, 18, 19, or 20 nucleotides in length. In some embodiments, the intended edit of base pair is within the target window. In some embodiments, the target window comprises the intended edit of base pair. In some embodiments, the method is performed using any of the base editors provided herein. In some embodiments, a target window is a deamination window.

[0577] In some embodiments, non-limiting exemplary cytidine base editors (CBE) include BE1 (APOBEC1-XTEN-dCas9), BE2 (APOBEC1-XTEN-dCas9-UGI), BE3 (APOBEC1-XTEN-dCas9(A840H)-UGI), BE3-Gam, saBE3, saBE4-Gam, BE4, BE4-Gam, saBE4, or saB4E-Gam. BE4 extends the APOBEC1-Cas9n(D10A) linker to 32 amino acids and the Cas9n-UGI linker to 9 amino acids, and appends a second copy of UGI to the C-terminus of the construct with another 9-amino acid linker into a single base editor construct. The base editors saBE3 and saBE4 have the S. pyogenes Cas9n(D10A) replaced with the smaller S. aureus Cas9n(D10A). BE3-Gam, saBE3-Gam, BE4-Gam, and saBE4-Gam have 174 residues of Gam protein fused to the N-terminus of BE3, saBE3, BE4, and saBE4 via the 16 amino acid XTEN linker.

[0578] In some embodiments, the adenosine base editor (ABE) can deaminate adenine in DNA. In some embodiments, ABE is generated by replacing APOBEC1 component of BE3 with natural or engineered E. coli TadA, human ADAR2, mouse ADA, or human ADAT2. In some embodiments, ABE comprises an evolved TadA variant. In some embodiments, the ABE is ABE 1.2 (TadA*-XTEN-nCas9-NLS). In some embodiments, TadA*comprises A106V and D108N mutations.

[0579] In some embodiments, the ABE is a second-generation ABE. In some embodiments, the ABE is ABE2.1, which comprises additional mutations D147Y and E155V in TadA*(TadA*2.1). In some embodiments, the ABE is ABE2.2, ABE2.1 fused to catalytically inactivated version of human alkyl adenine DNA glycosylase (AAG with E125Q mutation). In some embodiments, the ABE is ABE2.3, ABE2.1 fused to catalytically inactivated version of E. coli Endo V (inactivated with D35A mutation). In some embodiments, the ABE is ABE2.6 which has a linker twice as long (32 amino acids, (SGGS)₂-XTEN-(SGGS)₂) as the linker in ABE2.1. In some embodiments, the ABE is ABE2.7, which is ABE2.1 tethered with an additional wild-type TadA monomer. In some embodiments, the ABE is ABE2.8, which is ABE2.1 tethered with an additional TadA*2.1 monomer. In some embodiments, the ABE is ABE2.9, which is a direct fusion of evolved TadA (TadA*2.1) to the N-terminus of ABE2.1. In some embodiments, the ABE is ABE2.10, which is a direct fusion of wild type TadA to the N-terminus of ABE2.1. In some embodiments, the ABE is ABE2.11, which is ABE2.9 with an inactivating E59A mutation at the N-terminus of TadA*monomer. In some embodiments, the ABE is ABE2.12, which is ABE2.9 with an inactivating E59A mutation in the internal TadA* monomer.

[0580] In some embodiments, the ABE is a third generation ABE. In some embodiments, the ABE is ABE3.1, which is ABE2.3 with three additional TadA mutations (L84F, H123Y, and I157F).

[0581] In some embodiments, the ABE is a fourth generation ABE. In some embodiments, the ABE is ABE4.3, which is ABE3.1 with an additional TadA mutation A142N (TadA*4.3).

[0582] In some embodiments, the ABE is a fifth generation ABE. In some embodiments, the ABE is ABE5.1, which is generated by importing a consensus set of mutations from surviving clones (H36L, R51L, S146C, and K157N) into ABE3.1. In some embodiments, the ABE is ABE5.3, which has a heterodimeric construct containing wild-type E. coli TadA fused to an internal evolved TadA*. In some embodiments, the ABE is ABE5.2, ABE5.4, ABE5.5, ABE5.6, ABE5.7, ABE5.8, ABE5.9, ABE5.10, ABE5.11, ABE5.12, ABE5.13, or ABE5.14, as shown in below Table 9. In some embodiments, the ABE is a sixth generation ABE. In some embodiments, the ABE is ABE6.1, ABE6.2, ABE6.3, ABE6.4, ABE6.5, or ABE6.6, as shown in below Table 9. In some embodiments, the ABE is a seventh generation ABE. In some embodiments, the ABE is ABE7.1, ABE7.2, ABE7.3, ABE7.4, ABE7.5, ABE7.6, ABE7.7, ABE7.8, ABE 7.9, or ABE7.10, as shown in Table 9 below.

TABLE 9
Genotypes of ABEs

| | 23 | 26 | 36 | 37 | 48 | 49 | 51 | 72 | 84 | 87 | 106 | 108 | 123 | 125 | 142 | 146 | 147 | 152 | 155 | 156 | 157 | 161 |
|---|---|---|---|---|---|---|---|---|---|---|---|---|---|---|---|---|---|---|---|---|---|---|
| ABE0.1 | W | R | H | N | P | | R | N | L | S | A | D | H | G | A | S | D | R | E | I | K | K |
| ABE0.2 | W | R | H | N | P | | R | N | L | S | A | D | H | G | A | S | D | R | E | I | K | K |
| ABE1.1 | W | R | H | N | P | | R | N | L | S | A | N | H | G | A | S | D | R | E | I | K | K |
| ABE1.2 | W | R | H | N | P | | R | N | L | S | V | N | H | G | A | S | D | R | E | I | K | K |
| ABE2.1 | W | R | H | N | P | | R | N | L | S | V | N | H | G | A | S | Y | R | V | I | K | K |
| ABE2.2 | W | R | H | N | P | | R | N | L | S | V | N | H | G | A | S | Y | R | V | I | K | K |
| ABE2.3 | W | R | H | N | P | | R | N | L | S | V | N | H | G | A | S | Y | R | V | I | K | K |
| ABE2.4 | W | R | H | N | P | | R | N | L | S | V | N | H | G | A | S | Y | R | V | I | K | K |
| ABE2.5 | W | R | H | N | P | | R | N | L | S | V | N | H | G | A | S | Y | R | V | I | K | K |
| ABE2.6 | W | R | H | N | P | | R | N | L | S | V | N | H | G | A | S | Y | R | V | I | K | K |
| ABE2.7 | W | R | H | N | P | | R | N | L | S | V | N | H | G | A | S | Y | R | V | I | K | K |
| ABE2.8 | W | R | H | N | P | | R | N | L | S | V | N | H | G | A | S | Y | R | V | I | K | K |
| ABE2.9 | W | R | H | N | P | | R | N | L | S | V | N | H | G | A | S | Y | R | V | I | K | K |
| ABE2.10 | W | R | H | N | P | | R | N | L | S | V | N | H | G | A | S | Y | R | V | I | K | K |
| ABE2.11 | W | R | H | N | P | | R | N | L | S | V | N | H | G | A | S | Y | R | V | I | K | K |
| ABE2.12 | W | R | H | N | P | | R | N | L | S | V | N | H | G | A | S | Y | R | V | I | K | K |
| ABE3.1 | W | R | H | N | P | | R | N | F | S | V | N | Y | G | A | S | Y | R | V | F | K | K |
| ABE3.2 | W | R | H | N | P | | R | N | F | S | V | N | Y | G | A | S | Y | R | V | F | K | K |
| ABE3.3 | W | R | H | N | P | | R | N | F | S | V | N | Y | G | A | S | Y | R | V | F | K | K |
| ABE3.4 | W | R | H | N | P | | R | N | F | S | V | N | Y | G | A | S | Y | R | V | F | K | K |
| ABE3.5 | W | R | H | N | P | | R | N | F | S | V | N | Y | G | A | S | Y | R | V | F | K | K |
| ABE3.6 | W | R | H | N | P | | R | N | F | S | V | N | Y | G | A | S | Y | R | V | F | K | K |
| ABE3.7 | W | R | H | N | P | | R | N | F | S | V | N | Y | G | A | S | Y | R | V | F | K | K |
| ABE3.8 | W | R | H | N | P | | R | N | F | S | V | N | Y | G | A | S | Y | R | V | F | K | K |
| ABE4.1 | W | R | H | N | P | | R | N | L | S | V | N | H | G | N | S | Y | R | V | I | K | K |
| ABE4.2 | W | G | H | N | P | | R | N | L | S | V | N | H | G | N | S | Y | R | V | I | K | K |
| ABE4.3 | W | R | H | N | P | | R | N | F | S | V | N | Y | G | N | S | Y | R | V | F | K | K |
| ABE5.1 | W | R | L | N | P | | L | N | F | S | V | N | Y | G | A | C | Y | R | V | F | N | K |
| ABE5.2 | W | R | H | S | P | | R | N | F | S | V | N | Y | G | A | S | Y | R | V | F | K | T |
| ABE5.3 | W | R | L | N | P | | L | N | I | S | V | N | Y | G | A | C | Y | R | V | F | N | K |
| ABE5.4 | W | R | H | S | P | | R | N | F | S | V | N | Y | G | A | S | Y | R | V | F | K | T |
| ABE5.5 | W | R | L | N | P | | L | N | F | S | V | N | Y | G | A | C | Y | R | V | F | N | K |
| ABE5.6 | W | R | L | N | P | | L | N | F | S | V | N | Y | G | A | C | Y | R | V | F | N | K |
| ABE5.7 | W | R | L | N | P | | L | N | F | S | V | N | Y | G | A | C | Y | R | V | F | N | K |
| ABE5.8 | W | R | L | N | P | | L | N | F | S | V | N | Y | G | A | C | Y | R | V | F | N | K |
| ABE5.9 | W | R | L | N | P | | L | N | F | S | V | N | Y | G | A | C | Y | R | V | F | N | K |
| ABE5.10 | W | R | L | N | P | | L | N | F | S | V | N | Y | G | A | C | Y | R | V | F | N | K |
| ABE5.11 | W | R | L | N | P | | L | N | F | S | V | N | Y | G | A | C | Y | R | V | F | N | K |
| ABE5.12 | W | R | L | N | P | | L | N | F | S | V | N | Y | G | A | C | Y | R | V | F | N | K |
| ABE5.13 | W | R | H | N | P | | L | D | F | S | V | N | Y | A | A | S | Y | R | V | F | K | K |
| ABE5.14 | W | R | H | N | S | | L | N | F | C | V | N | Y | G | A | S | Y | R | V | F | K | K |
| ABE6.1 | W | R | H | N | S | | L | N | F | S | V | N | Y | G | N | S | Y | R | V | F | K | K |
| ABE6.2 | W | R | H | N | T | V | L | N | F | S | V | N | Y | G | N | S | Y | R | V | F | N | K |
| ABE6.3 | W | R | L | N | S | | L | N | F | S | V | N | Y | G | A | C | Y | R | V | F | N | K |
| ABE6.4 | W | R | L | N | S | | L | N | F | S | V | N | Y | G | N | C | Y | R | V | F | N | K |
| ABE6.5 | W | R | L | N | T | V | L | N | F | S | V | N | Y | G | A | C | Y | R | V | F | N | K |
| ABE6.6 | W | R | L | N | T | V | L | N | F | S | V | N | Y | G | N | C | Y | R | V | F | N | K |
| ABE7.1 | W | R | L | N | A | | L | N | F | S | V | N | Y | G | A | C | Y | R | V | F | N | K |
| ABE7.2 | W | R | L | N | A | | L | N | F | S | V | N | Y | G | N | C | Y | R | V | F | N | K |
| ABE7.3 | L | R | L | N | A | | L | N | F | S | V | N | Y | G | A | C | Y | R | V | F | N | K |
| ABE7.4 | R | R | L | N | A | | L | N | F | S | V | N | Y | G | A | C | Y | R | V | F | N | K |
| ABE7.5 | W | R | L | N | A | | L | N | F | S | V | N | Y | G | A | C | Y | H | V | F | N | K |
| ABE7.6 | W | R | L | N | A | | L | N | I | S | V | N | Y | G | A | C | Y | P | V | F | N | K |
| ABE7.7 | L | R | L | N | A | | L | N | F | S | V | N | Y | G | A | C | Y | P | V | F | N | K |
| ABE7.8 | L | R | L | N | A | | L | N | F | S | V | N | Y | G | N | C | Y | R | V | F | N | K |
| ABE7.9 | L | R | L | N | A | | L | N | F | S | V | N | Y | G | N | C | Y | P | V | F | N | K |
| ABE7.10 | R | R | L | N | A | | L | N | F | S | V | N | Y | G | A | C | Y | P | V | F | N | K |

[0583] In some embodiments, the base editor is an eighth generation ABE (ABE8). In some embodiments, the ABE8 contains a TadA*8 variant. In some embodiments, the ABE8 has a monomeric construct containing a TadA*8 variant (“ABE8.x-m”). In some embodiments, the ABE8 is ABE8.1-m, which has a monomeric construct containing TadA*7.10 with a Y147T mutation (TadA*8.1). In some embodiments, the ABE8 is ABE8.2-m, which has a monomeric construct containing TadA*7.10 with a Y147R mutation (TadA*8.2). In some embodiments, the ABE8 is ABE8.3-m, which has a monomeric construct containing TadA*7.10 with a Q154S mutation (TadA*8.3). In some embodiments, the ABE8 is ABE8.4-m, which has a monomeric construct containing TadA*7.10 with a Y123H mutation (TadA*8.4). In some embodiments, the ABE8 is ABE8.5-m, which has a monomeric construct containing TadA*7.10 with a V82S mutation (TadA*8.5). In some embodiments, the ABE8 is ABE8.6-m, which has a monomeric construct containing TadA*7.10 with a T166R mutation (TadA*8.6). In some embodiments, the ABE8 is ABE8.7-m, which has a monomeric construct containing TadA*7.10 with a Q154R mutation (TadA*8.7). In some embodiments, the ABE8 is ABE8.8-m, which has a monomeric construct containing TadA*7.10 with Y147R, Q154R, and Y123H mutations (TadA*8.8). In some embodiments, the ABE8 is ABE8.9-m, which has a monomeric construct containing TadA*7.10 with Y147R, Q154R and I76Y mutations (TadA*8.9). In some embodiments, the ABE8 is ABE8.10-m, which has a monomeric construct containing TadA*7.10 with Y147R, Q154R, and T166R mutations (TadA*8.10). In some embodiments, the ABE8 is ABE8.11-m, which has a monomeric construct containing TadA*7.10 with Y147T and Q154R mutations (TadA*8.11). In some embodiments, the ABE8 is ABE8.12-m, which has a monomeric construct containing TadA*7.10 with Y147T and Q154S mutations (TadA*8.12). In some embodiments, the ABE8 is ABE8.13-m, which has a monomeric construct containing TadA*7.10 with Y123H (Y123H reverted from H123Y), Y147R, Q154R and I76Y mutations (TadA*8.13). In some embodiments, the ABE8 is ABE8.14-m, which has a monomeric construct containing TadA*7.10 with I76Y and V82S mutations (TadA*8.14). In some embodiments, the ABE8 is ABE8.15-m, which has a monomeric construct containing TadA*7.10 with V82S and Y147R mutations (TadA*8.15). In some embodiments, the ABE8 is ABE8.16-m, which has a monomeric construct containing TadA*7.10 with V82S, Y123H (Y123H reverted from H123Y) and Y147R mutations (TadA*8.16). In some embodiments, the ABE8 is ABE8.17-m, which has a monomeric construct containing TadA*7.10 with V82S and Q154R mutations (TadA*8.17). In some embodiments, the ABE8 is ABE8.18-m, which has a monomeric construct containing TadA*7.10 with V82S, Y123H (Y123H reverted from H123Y) and Q154R mutations (TadA*8.18). In some embodiments, the ABE8 is ABE8.19-m, which has a monomeric construct containing TadA*7.10 with V82S, Y123H (Y123H reverted from H123Y), Y147R and Q154R mutations (TadA*8.19). In some embodiments, the ABE8 is ABE8.20-m, which has a monomeric construct containing TadA*7.10 with I76Y, V82S, Y123H (Y123H reverted from H123Y), Y147R and Q154R mutations (TadA*8.20). In some embodiments, the ABE8 is ABE8.21-m, which has a monomeric construct containing TadA*7.10 with Y147R and Q154S mutations (TadA*8.21). In some embodiments, the ABE8 is ABE8.22-m, which has a monomeric construct containing TadA*7.10 with V82S and Q154S mutations (TadA*8.22). In some embodiments, the ABE8 is ABE8.23-m, which has a monomeric construct containing TadA*7.10 with V82S and Y123H (Y123H reverted from H123Y) mutations (TadA*8.23). In some embodiments, the ABE8 is ABE8.24-m, which has a monomeric construct containing TadA*7.10 with V82S, Y123H (Y123H reverted from H123Y), and Y147T mutations (TadA*8.24).

[0584] In some embodiments, the ABE8 has a heterodimeric construct containing wild-type E. coli TadA fused to a TadA*8 variant (“ABE8.x-d”). In some embodiments, the ABE8 is ABE8.1-d, which has a heterodimeric construct containing wild-type E. coli TadA fused to TadA*7.10 with a Y147T mutation (TadA*8.1). In some embodiments, the ABE8 is ABE8.2-d, which has a heterodimeric construct containing wild-type E. coli TadA fused to TadA*7.10 with a Y147R mutation (TadA*8.2). In some embodiments, the ABE8 is ABE8.3-d, which has a heterodimeric construct containing wild-type E. coli TadA fused to TadA*7.10 with a Q154S mutation (TadA*8.3). In some embodiments, the ABE8 is ABE8.4-d, which has a heterodimeric construct containing wild-type E. coli TadA fused to TadA*7.10 with a Y123H mutation (TadA*8.4). In some embodiments, the ABE8 is ABE8.5-d, which has a heterodimeric construct containing wild-type E. coli TadA fused to TadA*7.10 with a V82S mutation (TadA*8.5). In some embodiments, the ABE8 is ABE8.6-d, which has a heterodimeric construct containing wild-type E. coli TadA fused to TadA*7.10 with a T166R mutation (TadA*8.6). In some embodiments, the ABE8 is ABE8.7-d, which has a heterodimeric construct containing wild-type E. coli TadA fused to TadA*7.10 with a Q154R mutation (TadA*8.7). In some embodiments, the ABE8 is ABE8.8-d, which has a heterodimeric construct containing wild-type E. coli TadA fused to TadA*7.10 with Y147R, Q154R, and Y123H mutations (TadA*8.8). In some embodiments, the ABE8 is ABE8.9-d, which has a heterodimeric construct containing wild-type E. coli TadA fused to TadA*7.10 with Y147R, Q154R and I76Y mutations (TadA*8.9). In some embodiments, the ABE8 is ABE8.10-d, which has a heterodimeric construct containing wild-type E. coli TadA fused to TadA*7.10 with Y147R, Q154R, and T166R mutations (TadA*8.10). In some embodiments, the ABE8 is ABE8.11-d, which has a heterodimeric construct containing wild-type E. coli TadA fused to TadA*7.10 with Y147T and Q154R mutations (TadA*8.11). In some embodiments, the ABE8 is ABE8.12-d, which has heterodimeric construct containing wild-type E. coli TadA fused to TadA*7.10 with Y147T and Q154S mutations (TadA*8.12). In some embodiments, the ABE8 is ABE8.13-d, which has a heterodimeric construct containing wild-type E. coli TadA fused to TadA*7.10 with Y123H (Y123H reverted from H123Y), Y147R, Q154R and I76Y mutations (TadA*8.13). In some embodiments, the ABE8 is ABE8.14-d, which has a heterodimeric construct containing wild-type E. coli TadA fused to TadA*7.10 with I76Y and V82S mutations (TadA*8.14). In some embodiments, the ABE8 is ABE8.15-d, which has a heterodimeric construct containing wild-type E. coli TadA fused to TadA*7.10 with V82S and Y147R mutations (TadA*8.15). In some embodiments, the ABE8 is ABE8.16-d, which has a heterodimeric construct containing wild-type E. coli TadA fused to TadA*7.10 with V82S, Y123H (Y123H reverted from H123Y) and Y147R mutations (TadA*8.16). In some embodiments, the ABE8 is ABE8.17-d, which has a heterodimeric construct containing wild-type E. coli TadA fused to TadA*7.10 with V82S and Q154R mutations (TadA*8.17). In some embodiments, the ABE8 is ABE8.18-d, which has a heterodimeric construct containing wild-type E. coli TadA fused to TadA*7.10 with V82S, Y123H (Y123H reverted from H123Y) and Q154R mutations (TadA*8.18). In some embodiments, the ABE8 is ABE8.19-d, which has a heterodimeric construct containing wild-type E. coli TadA fused to TadA*7.10 with V82S, Y123H (Y123H reverted from H123Y), Y147R and Q154R mutations (TadA*8.19). In some embodiments, the ABE8 is ABE8.20-d, which has a heterodimeric construct containing wild-type E. coli TadA fused to TadA*7.10 with I76Y, V82S, Y123H (Y123H reverted from H123Y), Y147R and Q154R mutations (TadA*8.20). In some embodiments, the ABE8 is ABE8.21-d, which has a heterodimeric construct containing wild-type E. coli TadA fused to TadA*7.10 with Y147R and Q154S mutations (TadA*8.21). In some embodiments, the ABE8 is ABE8.22-d, which has a heterodimeric construct containing wild-type E. coli TadA fused to TadA*7.10 with V82S and Q154S mutations (TadA*8.22). In some embodiments, the ABE8 is ABE8.23-d, which has a heterodimeric construct containing wild-type E. coli TadA fused to TadA*7.10 with V82S and Y123H (Y123H reverted from H123Y) mutations (TadA*8.23). In some embodiments, the ABE8 is ABE8.24-d, which has a heterodimeric construct containing wild-type E. coli TadA fused to TadA*7.10 with V82S, Y123H (Y123H reverted from H123Y), and Y147T mutations (TadA*8.24).

[0585] In some embodiments, the ABE8 has a heterodimeric construct containing TadA*7.10 fused to a TadA*8 variant (“ABE8.x-7”). In some embodiments, the ABE8 is ABE8.1-7, which has a heterodimeric construct containing TadA*7.10 fused to TadA*7.10 with a Y147T mutation (TadA*8.1). In some embodiments, the ABE8 is ABE8.2-7, which has a heterodimeric construct containing TadA*7.10 fused to TadA*7.10 with a Y147R mutation (TadA*8.2). In some embodiments, the ABE8 is ABE8.3-7, which has a heterodimeric construct containing TadA*7.10 fused to TadA*7.10 with a Q154S mutation (TadA*8.3). In some embodiments, the ABE8 is ABE8.4-7, which has a heterodimeric construct containing TadA*7.10 fused to TadA*7.10 with a Y123H mutation (TadA*8.4). In some embodiments, the ABE8 is ABE8.5-7, which has a heterodimeric construct containing TadA*7.10 fused to TadA*7.10 with a V82S mutation (TadA*8.5). In some embodiments, the ABE8 is ABE8.6-7, which has a heterodimeric construct containing TadA*7.10 fused to TadA*7.10 with a T166R mutation (TadA*8.6). In some embodiments, the ABE8 is ABE8.7-7, which has a heterodimeric construct containing TadA*7.10 fused to TadA*7.10 with a Q154R mutation (TadA*8.7). In some embodiments, the ABE8 is ABE8.8-7, which has a heterodimeric construct containing TadA*7.10 fused to TadA*7.10 with Y147R, Q154R, and Y123H mutations (TadA*8.8). In some embodiments, the ABE8 is ABE8.9-7, which has a heterodimeric construct containing TadA*7.10 fused to TadA*7.10 with Y147R, Q154R and I76Y mutations (TadA*8.9). In some embodiments, the ABE8 is ABE8.10-7, which has a heterodimeric construct containing TadA*7.10 fused to TadA*7.10 with Y147R, Q154R, and T166R mutations (TadA*8.10). In some embodiments, the ABE8 is ABE8.11-7, which has a heterodimeric construct containing TadA*7.10 fused to TadA*7.10 with Y147T and Q154R mutations (TadA*8.11). In some embodiments, the ABE8 is ABE8.12-7, which has a heterodimeric construct containing TadA*7.10 fused to TadA*7.10 with Y147T and Q154S mutations (TadA*8.12). In some embodiments, the ABE8 is ABE8.13-7, which has a heterodimeric construct containing TadA*7.10 fused to TadA*7.10 with Y123H (Y123H reverted from H123Y), Y147R, Q154R and I76Y mutations (TadA*8.13). In some embodiments, the ABE8 is ABE8.14-7, which has a heterodimeric construct containing TadA*7.10 fused to TadA*7.10 with I76Y and V82S mutations (TadA*8.14). In some embodiments, the ABE8 is ABE8.15-7, which has a heterodimeric construct containing TadA*7.10 fused to TadA*7.10 with V82S and Y147R mutations (TadA*8.15). In some embodiments, the ABE8 is ABE8.16-7, which has a heterodimeric construct containing TadA*7.10 fused to TadA*7.10 with V82S, Y123H (Y123H reverted from H123Y) and Y147R mutations (TadA*8.16). In some embodiments, the ABE8 is ABE8.17-7, which has a heterodimeric construct containing TadA*7.10 fused to TadA*7.10 with V82S and Q154R mutations (TadA*8.17). In some embodiments, the ABE8 is ABE8.18-7, which has a heterodimeric construct containing TadA*7.10 fused to TadA*7.10 with V82S, Y123H (Y123H reverted from H123Y) and Q154R mutations (TadA*8.18). In some embodiments, the ABE8 is ABE8.19-7, which has a heterodimeric construct containing TadA*7.10 fused to TadA*7.10 with V82S, Y123H (Y123H reverted from H123Y), Y147R and Q154R mutations (TadA*8.19). In some embodiments, the ABE8 is ABE8.20-7, which has a heterodimeric construct containing TadA*7.10 fused to TadA*7.10 with I76Y, V82S, Y123H (Y123H reverted from H123Y), Y147R and Q154R mutations (TadA*8.20). In some embodiments, the ABE8 is ABE8.21-7, which has a heterodimeric construct containing TadA*7.10 fused to TadA*7.10 with Y147R and Q154S mutations (TadA*8.21). In some embodiments, the ABE8 is ABE8.22-7, which has a heterodimeric construct containing TadA*7.10 fused to TadA*7.10 with V82S and Q154S mutations (TadA*8.22). In some embodiments, the ABE8 is ABE8.23-7, which has a heterodimeric construct containing TadA*7.10 fused to TadA*7.10 with V82S and Y123H (Y123H reverted from H123Y) mutations (TadA*8.23). In some embodiments, the ABE8 is ABE8.24-7, which has a heterodimeric construct containing TadA*7.10 fused to TadA*7.10 with V82S, Y123H (Y123H reverted from H123Y), and Y147T mutations (TadA*8.24

[0586] In some embodiments, the ABE is ABE8.1-m, ABE8.2-m, ABE8.3-m, ABE8.4-m, ABE8.5-m, ABE8.6-m, ABE8.7-m, ABE8.8-m, ABE8.9-m, ABE8.10-m, ABE8.11-m, ABE8.12-m, ABE8.13-m, ABE8.14-m, ABE8.15-m, ABE8.16-m, ABE8.17-m, ABE8.18-m, ABE8.19-m, ABE8.20-m, ABE8.21-m, ABE8.22-m, ABE8.23-m, ABE8.24-m, ABE8.1-d, ABE8.2-d, ABE8.3-d, ABE8.4-d, ABE8.5-d, ABE8.6-d, ABE8.7-d, ABE8.8-d, ABE8.9-d, ABE8.10-d, ABE8.11-d, ABE8.12-d, ABE8.13-d, ABE8.14-d, ABE8.15-d, ABE8.16-d, ABE8.17-d, ABE8.18-d, ABE8.19-d, ABE8.20-d, ABE8.21-d, ABE8.22-d, ABE8.23-d, or ABE8.24-d as shown in Table 10 below.

TABLE 10
Adenosine Deaminase Base Editor 8 Variants

| | Adenosine | |
|---|---|---|
| ABE8 | Deaminase | Adenosine Deaminase Description |
| ABE8.1-m | TadA*8.1 | Monomer_TadA*7.10 + Y147T |
| ABE8.2-m | TadA*8.2 | Monomer_TadA*7.10 + Y147R |
| ABE8.3-m | TadA*8.3 | Monomer_TadA*7.10 + Q154S |
| ABE8.4-m | TadA*8.4 | Monomer_TadA*7.10 + Y123H |
| ABE8.5-m | TadA*8.5 | Monomer_TadA*7.10 + V82S |
| ABE8.6-m | TadA*8.6 | Monomer_TadA*7.10 + T166R |
| ABE8.7-m | TadA*8.7 | Monomer_TadA*7.10 + Q154R |
| ABE8.8-m | TadA*8.8 | Monomer_TadA*7.10 + Y147R_Q154R_Y123H |
| ABE8.9-m | TadA*8.9 | Monomer_TadA*7.10 + Y147R_Q154R_I76Y |
| ABE8.10-m | TadA*8.10 | Monomer_TadA*7.10 + Y147R_Q154R_T166R |
| ABE8.11-m | TadA*8.11 | Monomer_TadA*7.10 + Y147T_Q154R |
| ABE8.12-m | TadA*8.12 | Monomer_TadA*7.10 + Y147T_Q154S |
| ABE8.13-m | TadA*8.13 | Monomer_TadA*7.10 + Y123H_Y147R_Q154R_I76Y |
| ABE8.14-m | TadA*8.14 | Monomer_TadA*7.10 + I76Y_V82S |
| ABE8.15-m | TadA*8.15 | Monomer_TadA*7.10 + V82S_Y147R |
| ABE8.16-m | TadA*8.16 | Monomer_TadA*7.10 + V82S_Y123H_Y147R |
| ABE8.17-m | TadA*8.17 | Monomer_TadA*7.10 + V82S_Q154R |
| ABE8.18-m | TadA*8.18 | Monomer_TadA*7.10 + V82S_Y123H_Q154R |
| ABE8.19-m | TadA*8.19 | Monomer_TadA*7.10 + V82S_Y123H_Y147R_Q154R |
| ABE8.20-m | TadA*8.20 | Monomer_TadA*7.10 + I76Y_V82S_Y123H_Y147R_Q154R |
| ABE8.21-m | TadA*8.21 | Monomer_TadA*7.10 + Y147R_Q154S |
| ABE8.22-m | TadA*8.22 | Monomer_TadA*7.10 + V82S_Q154S |
| ABE8.23-m | TadA*8.23 | Monomer_TadA*7.10 + V82S_Y123H |
| ABE8.24-m | TadA*8.24 | Monomer_TadA*7.10 + V82S_Y123H_Y147T |
| ABE8.1-d | TadA*8.1 | Heterodimer_(WT) + (TadA*7.10 + Y147T) |
| ABE8.2-d | TadA*8.2 | Heterodimer_(WT) + (TadA*7.10 + Y147R) |
| ABE8.3-d | TadA*8.3 | Heterodimer_(WT) + (TadA*7.10 + Q154S) |
| ABE8.4-d | TadA*8.4 | Heterodimer_(WT) + (TadA*7.10 + Y123H) |
| ABE8.5-d | TadA*8.5 | Heterodimer_(WT) + (TadA*7.10 + V82S) |
| ABE8.6-d | TadA*8.6 | Heterodimer_(WT) + (TadA*7.10 + T166R) |
| ABE8.7-d | TadA*8.7 | Heterodimer_(WT) + (TadA*7.10 + Q154R) |
| ABE8.8-d | TadA*8.8 | Heterodimer_(WT) + (TadA*7.10 + Y147R_Q154R_Y123H) |
| ABE8.9-d | TadA*8.9 | Heterodimer_(WT) + (TadA*7.10 + Y147R_Q154R_I76Y) |
| ABE8.10-d | TadA*8.10 | Heterodimer_(WT) + (TadA*7.10 + Y147R_Q154R_T166R) |
| ABE8.11-d | TadA*8.11 | Heterodimer_(WT) + (TadA*7.10 + Y147T_Q154R) |
| ABE8.12-d | TadA*8.12 | Heterodimer_(WT) + (TadA*7.10 + Y147T_Q154S) |
| ABE8.13-d | TadA*8.13 | Heterodimer_(WT) + (TadA*7.10 + Y123H_Y147T_Q154R_I76Y) |
| ABE8.14-d | TadA*8.14 | Heterodimer_(WT) + (TadA*7.10 + I76Y_V82S) |
| ABE8.15-d | TadA*8.15 | Heterodimer_(WT) + (TadA*7.10 + V82S_Y147R) |
| ABE8.16-d | TadA*8.16 | Heterodimer_(WT) + (TadA*7.10 + V82S_Y123H_Y147R) |
| ABE8.17-d | TadA*8.17 | Heterodimer_(WT) + (TadA*7.10 + V82S_Q154R) |
| ABE8.18-d | TadA*8.18 | Heterodimer_(WT) + (TadA*7.10 + V82S_Y123H_Q154R) |
| ABE8.19-d | TadA*8.19 | Heterodimer_(WT) + (TadA*7.10 + V82S_Y123H_Y147R_Q154R) |
| ABE8.20-d | TadA*8.20 | Heterodimer_(WT) + (TadA*7.10 + I76Y_V82S_Y123H_Y147R_Q154R) |
| ABE8.21-d | TadA*8.21 | Heterodimer_(WT) + (TadA*7.10 + Y147R_Q154S) |
| ABE8.22-d | TadA*8.22 | Heterodimer_(WT) + (TadA*7.10 + V82S_Q154S) |
| ABE8.23-d | TadA*8.23 | Heterodimer_(WT) + (TadA*7.10 + V82S_Y123H) |
| ABE8.24-d | TadA*8.24 | Heterodimer_(WT) + (TadA*7.10 + V82S_Y123H_Y147T) |
| ABE8.25 | TadA*8.25 | |
| ABE8.26 | TadA*8.26 | |

[0587] In some embodiments, the ABE8 is ABE8a-m, which has a monomeric construct containing TadA*7.10 with R26C, A109S, T111R, D119N, H122N, Y147D, F149Y, T166I, and D167N mutations (TadA*8a). In some embodiments, the ABE8 is ABE8b-m, which has a monomeric construct containing TadA*7.10 with V88A, A109S, T111R, D119N, H122N, F149Y, T166I, and D167N mutations (TadA*8b). In some embodiments, the ABE8 is ABE8c-m, which has a monomeric construct containing TadA*7.10 with R26C, A109S, T111R, D119N, H122N, F149Y, T166I, and D167N mutations (TadA*8c). In some embodiments, the ABE8 is ABE8d-m, which has a monomeric construct containing TadA*7.10 with V88A, T111R, D119N, and F149Y mutations (TadA*8d). In some embodiments, the ABE8 is ABE8e-m, which has a monomeric construct containing TadA*7.10 with A109S, T111R, D119N, H122N, Y147D, F149Y, 11661, and D167N mutations (TadA*8e).

[0588] In some embodiments, the ABE8 is ABE8a-d, which has a heterodimeric construct containing wild-type E. coli TadA fused to TadA*7.10 with R26C, A109S, T111R, D119, H122N, Y147D, F149Y, 11661, and D167N mutations (TadA*8a). In some embodiments, the ABE8 is ABE8b-d, which has a heterodimeric construct containing wild-type E. coli TadA fused to TadA*7.10 with V88A, A109S, T111R, D119N, H122N, F149Y, 11661, and D167N mutations (TadA*8b). In some embodiments, the ABE8 is ABE8c-d, which has a heterodimeric construct containing wild-type E. coli TadA fused to TadA*7.10 with R26C, A109S, T111R, D119N, H122N, F149Y, 11661, and D167N mutations (TadA*8c). In some embodiments, the ABE8 is ABE8d-d, which has a heterodimeric construct containing wild-type E. coli TadA fused to TadA*7.10 with V88A, T111R, D119N, and F149Y mutations (TadA*8d). In some embodiments, the ABE8 is ABE8e-d, which has a heterodimeric construct containing wild-type E. coli TadA fused to TadA*7.10 with A109S, T111R, D119N, H122N, Y147D, F149Y, 11661, and D167N mutations (TadA*8e).

[0589] In some embodiments, the ABE8 is ABE8a-7, which has a heterodimeric construct containing TadA*7.10 fused to TadA*7.10 with R26C, A109S, T111R, D119, H122N, Y147D, F149Y, 11661, and D167N mutations (TadA*8a). In some embodiments, the ABE8 is ABE8b-7, which has a heterodimeric construct containing TadA*7.10 fused to TadA*7.10 with V88A, A109S, T111R, D119N, H122N, F149Y, 11661, and D167N mutations (TadA*8b). In some embodiments, the ABE8 is ABE8c-7, which has a heterodimeric construct containing TadA*7.10 fused to TadA*7.10 with R26C, A109S, T111R, D119N, H122N, F149Y, 11661, and D167N mutations (TadA*8c). In some embodiments, the ABE8 is ABE8d-7, which has a heterodimeric construct containing TadA*7.10 fused to TadA*7.10 with V88A, T111R, D119N, and F149Y mutations (TadA*8d). In some embodiments, the ABE8 is ABE8e-7, which has a heterodimeric construct containing TadA*7.10 fused to TadA*7.10 with A109S, T111R, D119N, H122N, Y147D, F149Y, T166I, and D167N mutations (TadA*8e).

[0590] In some embodiments, the ABE is ABE8a-m, ABE8b-m, ABE8c-m, ABE8d-m, ABE8e-m, ABE8a-d, ABE8b-d, ABE8c-d, ABE8d-d, or ABE8e-d, as shown in Table 11 below. In some embodiments, the ABE is ABE8e-m or ABE8e-d. ABE8e shows efficient adenine base editing activity and low indel formation when used with Cas homologues other than SpCas9, for example, SaCas9, SaCas9-KKH, Cas12a homologues, e.g., LbCas12a, enAs-Cas12a, SpCas9-NG and circularly permuted CP1028-SpCas9 and CP1041-SpCas9. In addition to the mutations shown for ABE8e in Table 11, off-target RNA and DNA editing were reduced by introducing a V106W substitution into the TadA domain (as described in M. Richter et al., 2020, Nature Biotechnology, doi.org/10.1038/s41587-020-0453-z, the entire contents of which are incorporated by reference herein).

TABLE 11
Additional Adenosine Deaminase Base Editor 8 Variants

| ABE8 Base | Adenosine | |
|---|---|---|
| Editor | Deaminase | Adenosine Deaminase Description |
| ABE8a-m | TadA*8a | Monomer_TadA*7.10 + R26C + A109S + T111R + D119N + H122N + |
| | | Y147D + F149Y + T166I + D167N |
| ABE8b-m | TadA*8b | Monomer_TadA*7.10 + V88A + A109S + T111R + D119N + H122N + |
| | | F149Y + T166I + D167N |
| ABE8c-m | TadA*8c | Monomer_TadA*7.10 + R26C + A109S + T111R + D119N + H122N + |
| | | F149Y + T166I + D167N |
| ABE8d-m | TadA*8d | Monomer_TadA*7.10 + V88A + T111R + D119N + F149Y |
| ABE8e-m | TadA*8e | Monomer_TadA*7.10 + A109S + T111R + D119N + H122N + |
| | | Y147D + F149Y + T166I + D167N |
| ABE8a-d | TadA*8a | Heterodimer_(WT) + (TadA*7.10 + R26C + A109S + T111R + |
| | | D119N + H122N + Y147D + F149Y + T166I + D167N) |
| ABE8b-d | TadA*8b | Heterodimer_(WT) + (TadA*7.10 + V88A + A109S + T111R + |
| | | D119N + H122N + F149Y + T166I + D167N) |
| ABE8c-d | TadA*8c | Heterodimer_(WT) + (TadA*7.10 + R26C + A109S + T111R + |
| | | D119N + H122N + F149Y + T166I + D167N) |
| ABE8d-d | TadA*8d | Heterodimer_(WT) + (TadA*7.10 + V88A + T111R + D119N + F149Y) |
| ABE8e-d | TadA*8e | Heterodimer_(WT) + (TadA*7.10 + A109S + T111R + D119N + |
| | | H122N + Y147D + F149Y + T166I + D167N) |

[0591] In some embodiments, base editors (e.g., ABE8) are generated by cloning an adenosine deaminase variant (e.g., TadA*8) into a scaffold that includes a circular permutant Cas9 (e.g., CP5 or CP6) and a bipartite nuclear localization sequence. In some embodiments, the base editor (e.g., ABE7.9, ABE7.10, or ABE8) is an NGC PAM CP5 variant (S. pyogenes Cas9 or spVRQR Cas9). In some embodiments, the base editor (e.g., ABE7.9, ABE7.10, or ABE8) is an AGA PAM CP5 variant (S. pyogenes Cas9 or spVRQR Cas9). In some embodiments, the base editor (e.g., ABE7.9, ABE7.10, or ABE8) is an NGC PAM CP6 variant (S. pyogenes Cas9 or spVRQR Cas9). In some embodiments, the base editor (e.g. ABE7.9, ABE7.10, or ABE8) is an AGA PAM CP6 variant (S. pyogenes Cas9 or spVRQR Cas9).

[0592] In some embodiments, the ABE has a genotype as shown in Table 12 below.

TABLE 12
Genotypes of ABEs

| | 23 | 26 | 36 | 37 | 48 | 49 | 51 | 72 | 84 | 87 | 105 | 108 | 123 | 125 | 142 | 145 | 147 | 152 | 155 | 156 | 157 | 161 |
|---|---|---|---|---|---|---|---|---|---|---|---|---|---|---|---|---|---|---|---|---|---|---|
| ABE7.9 | L | R | L | N | A | | L | N | F | S | V | N | Y | G | N | C | Y | P | V | F | N | K |
| ABE7.10 | R | R | L | N | A | | L | N | F | S | V | N | Y | G | A | C | Y | P | V | F | N | K |

[0593] As shown in Table 13 below, genotypes of 40 ABE8s are described. Residue positions in the evolved E. coli TadA portion of ABE are indicated. Mutational changes in ABE8 are shown when distinct from ABE7.10 mutations. In some embodiments, the ABE has a genotype of one of the ABEs as shown in Table 13 below.

TABLE 13
Residue Identity in Evolved TadA

| | 23 | 36 | 48 | 51 | 76 | 82 | 84 | 106 | 108 | 123 | 146 | 147 | 152 | 154 | 155 | 156 | 157 | 166 |
|---|---|---|---|---|---|---|---|---|---|---|---|---|---|---|---|---|---|---|
| ABE7.10 | R | L | A | L | I | V | F | V | N | Y | C | Y | P | Q | V | F | N | T |
| ABE8.1-m | | | | | | | | | | | | T | | | | | | |
| ABE8.2-m | | | | | | | | | | | | R | | | | | | |
| ABE8.3-m | | | | | | | | | | | | | | S | | | | |
| ABE8.4-m | | | | | | | | | | H | | | | | | | | |
| ABE8.5-m | | | | | | S | | | | | | | | | | | | |
| ABE8.6-m | | | | | | | | | | | | | | | | | | R |
| ABE8.7-m | | | | | | | | | | | | | | R | | | | |
| ABE8.8-m | | | | | | | | | | H | | R | | R | | | | |
| ABE8.9-m | | | | | Y | | | | | | | R | | R | | | | |
| ABE8.10-m | | | | | | | | | | | | R | | R | | | | R |
| ABE8.11-m | | | | | | | | | | | | T | | R | | | | |
| ABE8.12-m | | | | | | | | | | | | T | | S | | | | |
| ABE8.13-m | | | | | Y | | | | | H | | R | | R | | | | |
| ABE8.14-m | | | | | Y | S | | | | | | | | | | | | |
| ABE8.15-m | | | | | | S | | | | | | R | | | | | | |
| ABE8.16-m | | | | | | S | | | | H | | R | | | | | | |
| ABE8.17-m | | | | | | S | | | | | | | | R | | | | |
| ABE8.18-m | | | | | | S | | | | H | | | | R | | | | |
| ABE8.19-m | | | | | | S | | | | H | | R | | R | | | | |
| ABE8.20-m | | | | | Y | S | | | | H | | R | | R | | | | |
| ABE8.21-m | | | | | | | | | | | | R | | S | | | | |
| ABE8.22-m | | | | | | S | | | | | | | | S | | | | |
| ABE8.23-m | | | | | | S | | | | H | | | | | | | | |
| ABE8.24-m | | | | | | S | | | | H | | T | | | | | | |
| ABE8.1-d | | | | | | | | | | | | T | | | | | | |
| ABE8.2-d | | | | | | | | | | | | R | | | | | | |
| ABE8.3-d | | | | | | | | | | | | | | S | | | | |
| ABE8.4-d | | | | | | | | | | H | | | | | | | | |
| ABE8.5-d | | | | | | S | | | | | | | | | | | | |
| ABE8.6-d | | | | | | | | | | | | | | | | | | R |
| ABE8.7-d | | | | | | | | | | | | | | R | | | | |
| ABE8.8-d | | | | | | | | | | H | | R | | R | | | | |
| ABE8.9-d | | | | | Y | | | | | | | R | | R | | | | |
| ABE8.10-d | | | | | | | | | | | | R | | R | | | | R |
| ABE8.11-d | | | | | | | | | | | | T | | R | | | | |
| ABE8.12-d | | | | | | | | | | | | T | | S | | | | |
| ABE8.13-d | | | | | Y | | | | | H | | R | | R | | | | |
| ABE8.14-d | | | | | Y | S | | | | | | | | | | | | |
| ABE8.15-d | | | | | | S | | | | | | R | | | | | | |
| ABE8.16-d | | | | | | S | | | | H | | R | | | | | | |
| ABE8.17-d | | | | | | S | | | | | | | | R | | | | |
| ABE8.18-d | | | | | | S | | | | H | | | | R | | | | |
| ABE8.19-d | | | | | | S | | | | H | | R | | R | | | | |
| ABE8.20-d | | | | | Y | S | | | | H | | R | | R | | | | |
| ABE8.21-d | | | | | | | | | | | | R | | S | | | | |
| ABE8.22-d | | | | | | S | | | | | | | | S | | | | |
| ABE8.23-d | | | | | | S | | | | H | | | | | | | | |
| ABE8.24-d | | | | | | S | | | | H | | T | | | | | | |

[0594] In some embodiments, the base editor is ABE8.1, which comprises or consists essentially of the following sequence or a fragment thereof having adenosine deaminase activity:

ABE8.1_Y147T_CP5_NGC PAM_monomer
MSEVEFSHEYWMRHALTLAKRARDEREVPVGAVLVLNNRVIGEGWNRAIG
LHDPTAHAEIMALRQGGLVMQNYRLIDATLYVTFEPCVMCAGAMIHSRIG
RVVFGVRNAKTGAAGSLMDVLHYPGMNHRVEITEGILADECAALLCTFFR
MPRQVFNAQKKAQSSTD [symbol] [symbol] EI
GKATAKYFFYSNIMNFFKTEITLANGEIRKRPLIETNGETGEIVWDKGRD
FATVRKVLSMPQVNIVKKTEVQTGGFSKESILPKRNSDKLIARKKDWDPK
KYGGFMQPTVAYSVLVVAKVEKGKSKKLKSVKELLGITIMERSSFEKNPI
DFLEAKGYKEVKKDLIIKLPKYSLFELENGRKRMLASAKFLQKGNELALP
SKYVNFLYLASHYEKLKGSPEDNEQKQLFVEQHKHYLDEIIEQISEFSKR
VILADANLDKVLSAYNKHRDKPIREQAENIIHLFTLTNLGAPRAFKYFDT
TIARKEYRSTKEVLDATLIHQSITGLYETRIDLSQLGGDGGSGGSGGSGG
SGGSGGSGGMDKKYSIGLAIGTNSVGWAVITDEYKVPSKKFKVLGNTDRH
SIKKNLIGALLFDSGETAEATRLKRTARRRYTRRKNRICYLQEIFSNEMA
KVDDSFFHRLEESFLVEEDKKHERHPIFGNIVDEVAYHEKYPTIYHLRKK
LVDSTDKADLRLIYLALAHMIKFRGHFLIEGDLNPDNSDVDKLFIQLVQT
YNQLFEENPINASGVDAKAILSARLSKSRRLENLIAQLPGEKKNGLFGNL
IALSLGLTPNFKSNFDLAEDAKLQLSKDTYDDDLDNLLAQIGDQYADLFL
AAKNLSDAILLSDILRVNTEITKAPLSASMIKRYDEHHQDLTLLKALVRQ
QLPEKYKEIFFDQSKNGYAGYIDGGASQEEFYKFIKPILEKMDGTEELLV
KLNREDLLRKQRTFDNGSIPHQIHLGELHAILRRQEDFYPFLKDNREKIE
KILTFRIPYYVGPLARGNSRFAWMTRKSEETITPWNFEEVVDKGASAQSF
IERMTNFDKNLPNEKVLPKHSLLYEYFTVYNELTKVKYVTEGMRKPAFLS
GEQKKAIVDLLFKTNRKVTVKQLKEDYFKKIECFDSVEISGVEDRFNASL
GTYHDLLKIIKDKDFLDNEENEDILEDIVLTLTLFEDREMIEERLKTYAH
LFDDKVMKQLKRRRYTGWGRLSRKLINGIRDKQSGKTILDFLKSDGFANR
NFMQLIHDDSLTFKEDIQKAQVSGQGDSLHEHIANLAGSPAIKKGILQTV
KVVDELVKVMGRHKPENIVIEMARENQTTQKGQKNSRERMKRIEEGIKEL
GSQILKEHPVENTQLQNEKLYLYYLQNGRDMYVDQELDINRLSDYDVDHI
VPQSFLKDDSIDNKVLTRSDKNRGKSDNVPSEEVVKKMKNYWRQLLNAKL
ITQRKFDNLTKAERGGLSELDKAGFIKRQLVETRQITKHVAQILDSRMNT
KYDENDKLIREVKVITLKSKLVSDFRKDFQFYKVREINNYHHAHDAYLNA
VVGTALIKKYPKLESEFVYGDYKVYDVRKMIAKSEQEGADKRTADGSEFE
SPKKKRKV*

In the above sequence, the plain text denotes an adenosine deaminase sequence, bold sequence indicates sequence derived from Cas9, the italics sequence denotes a linker sequence, and the underlined sequence denotes a bipartite nuclear localization sequence.

[0595] In some embodiments, the base editor is ABE8.1, which comprises or consists essentially of the following sequence or a fragment thereof having adenosine deaminase activity:

pNMG-B335 ABE8.1_Y147T_CP5_NGC PAM_monomer:
MSEVEFSHEYWMRHALTLAKRARDEREVPVGAVLVLNNRVIGEGWNRAIG
LHDPTAHAEIMALRQGGLVMQNYRLIDATLYVTFEPCVMCAGAMIHSRIG
RVVFGVRNAKTGAAGSLMDVLHYPGMNHRVEITEGILADECAALLCTFFR
MPRQVFNAQKKAQSSTDSGGSSGGSSGSETPGTSESATPESSGGSSGGSE
IGKATAKYFFYSNIMNFFKTEITLANGEIRKRPLIETNGETGEIVWDKGR
DFATVRKVLSMPQVNIVKKTEVQTGGFSKESILPKRNSDKLIARKKDWDP
KKYGGFMQPTVAYSVLVVAKVEKGKSKKLKSVKELLGITIMERSSFEKNP
IDFLEAKGYKEVKKDLIIKLPKYSLFELENGRKRMLASAKFLQKGNELAL
PSKYVNFLYLASHYEKLKGSPEDNEQKQLFVEQHKHYLDEIIEQISEFSK
RVILADANLDKVLSAYNKHRDKPIREQAENIIHLFTLTNLGAPRAFKYFD
TTIARKEYRSTKEVLDATLIHQSITGLYETRIDLSQLGGDGGSGGSGGSG
GSGGSGGSGGMDKKYSIGLAIGTNSVGWAVITDEYKVPSKKFKVLGNTDR
HSIKKNLIGALLFDSGETAEATRLKRTARRRYTRRKNRICYLQEIFSNEM
AKVDDSFFHRLEESFLVEEDKKHERHPIFGNIVDEVAYHEKYPTIYHLRK
KLVDSTDKADLRLIYLALAHMIKFRGHFLIEGDLNPDNSDVDKLFIQLVQ
TYNQLFEENPINASGVDAKAILSARLSKSRRLENLIAQLPGEKKNGLFGN
LIALSLGLTPNFKSNFDLAEDAKLQLSKDTYDDDLDNLLAQIGDQYADLF
LAAKNLSDAILLSDILRVNTEITKAPLSASMIKRYDEHHQDLTLLKALVR
QQLPEKYKEIFFDQSKNGYAGYIDGGASQEEFYKFIKPILEKMDGTEELL
VKLNREDLLRKQRTFDNGSIPHQIHLGELHAILRRQEDFYPFLKDNREKI
EKILTFRIPYYVGPLARGNSRFAWMTRKSEETITPWNFEEVVDKGASAQS
FIERMTNFDKNLPNEKVLPKHSLLYEYFTVYNELTKVKYVTEGMRKPAFL
SGEQKKAIVDLLFKTNRKVTVKQLKEDYFKKIECFDSVEISGVEDRFNAS
LGTYHDLLKIIKDKDFLDNEENEDILEDIVLTLTLFEDREMIEERLKTYA
HLFDDKVMKQLKRRRYTGWGRLSRKLINGIRDKQSGKTILDFLKSDGFAN
RNFMQLIHDDSLTFKEDIQKAQVSGQGDSLHEHIANLAGSPAIKKGILQT
VKVVDELVKVMGRHKPENIVIEMARENQTTQKGQKNSRERMKRIEEGIKE
LGSQILKEHPVENTQLQNEKLYLYYLQNGRDMYVDQELDINRLSDYDVDH
IVPQSFLKDDSIDNKVLTRSDKNRGKSDNVPSEEVVKKMKNYWRQLLNAK
LITQRKFDNLTKAERGGLSELDKAGFIKRQLVETRQITKHVAQILDSRMN
TKYDENDKLIREVKVITLKSKLVSDFRKDFQFYKVREINNYHHAHDAYLN
AVVGTALIKKYPKLESEFVYGDYKVYDVRKMIAKSEQEGADKRTADGSEF
ESPKKKRKV*

In the above sequence, the plain text denotes an adenosine deaminase sequence, bold sequence indicates sequence derived from Cas9, the italics sequence denotes a linker sequence, and the underlined sequence denotes a bipartite nuclear localization sequence.

[0596] In some embodiments, the base editor is ABE8.14, which comprises or consists essentially of the following sequence or a fragment thereof having adenosine deaminase activity:

pNMG-357_ABE8.14 with NGC PAM CP5
MSEVEFSHEYWMRHALTLAKRAWDEREVPVGAVLVHNNRVIGEGWNRPIG
RHDPTAHAEIMALRQGGLVMQNYRLIDATLYVTLEPCVMCAGAMIHSRIG
RVVFGARDAKTGAAGSLMDVLHHPGMNHRVEITEGILADECAALLSDFFR
MRRQEIKAQKKAQSSTDGGSSGGSSGSETPGTSESATPESSGGSSGGSMS
EVEFSHEYWMRHALTLAKRARDEREVPVGAVLVLNNRVIGEGWNRAIGLH
DPTAHAEIMALRQGGLVMQNYRLIDATLYVTFEPCVMCAGAMIHSRIGRV
VFGVRNAKTGAAGSLMDVLHYPGMNHRVEITEGILADECAALLCTFFRMP
RQVFNAQKKAQSSTDSGGSSGGSSGSETPGTSESATPESSGGSSGGSEIG
KATAKYFFYSNIMNFFKTEITLANGEIRKRPLIETNGETGEIVWDKGRDF
ATVRKVLSMPQVNIVKKTEVQTGGFSKESILPKRNSDKLIARKKDWDPKK
YGGFMQPTVAYSVLVVAKVEKGKSKKLKSVKELLGITIMERSSFEKNPID
FLEAKGYKEVKKDLIIKLPKYSLFELENGRKRMLASAKFLQKGNELALPS
KYVNFLYLASHYEKLKGSPEDNEQKQLFVEQHKHYLDEIIEQISEFSKRV
ILADANLDKVLSAYNKHRDKPIREQAENIIHLFTLTNLGAPRAFKYFDTT
IARKEYRSTKEVLDATLIHQSITGLYETRIDLSQLGGDGGSGGSGGSGGS
GGSGGSGGMDKKYSIGLAIGTNSVGWAVITDEYKVPSKKFKVLGNTDRHS
IKKNLIGALLFDSGETAEATRLKRTARRRYTRRKNRICYLQEIFSNEMAK
VDDSFFHRLEESFLVEEDKKHERHPIFGNIVDEVAYHEKYPTIYHLRKKL
VDSTDKADLRLIYLALAHMIKFRGHFLIEGDLNPDNSDVDKLFIQLVQTY
NQLFEENPINASGVDAKAILSARLSKSRRLENLIAQLPGEKKNGLFGNLI
ALSLGLTPNFKSNFDLAEDAKLQLSKDTYDDDLDNLLAQIGDQYADLFLA
AKNLSDAILLSDILRVNTEITKAPLSASMIKRYDEHHQDLTLLKALVRQQ
LPEKYKEIFFDQSKNGYAGYIDGGASQEEFYKFIKPILEKMDGTEELLVK
LNREDLLRKQRTFDNGSIPHQIHLGELHAILRRQEDFYPFLKDNREKIEK
ILTFRIPYYVGPLARGNSRFAWMTRKSEETITPWNFEEVVDKGASAQSFI
ERMTNFDKNLPNEKVLPKHSLLYEYFTVYNELTKVKYVTEGMRKPAFLSG
EQKKAIVDLLFKTNRKVTVKQLKEDYFKKIECFDSVEISGVEDRFNASLG
TYHDLLKIIKDKDELDNEENEDILEDIVLTLTLFEDREMIEERLKTYAHL
FDDKVMKQLKRRRYTGWGRLSRKLINGIRDKQSGKTILDFLKSDGFANRN
FMQLIHDDSLTFKEDIQKAQVSGQGDSLHEHIANLAGSPAIKKGILQTVK
VVDELVKVMGRHKPENIVIEMARENQTTQKGQKNSRERMKRIEEGIKELG
SQILKEHPVENTQLQNEKLYLYYLQNGRDMYVDQELDINRLSDYDVDHIV
PQSFLKDDSIDNKVLTRSDKNRGKSDNVPSEEVVKKMKNYWRQLLNAKLI
TQRKFDNLTKAERGGLSELDKAGEIKRQLVETRQITKHVAQILDSRMNTK
YDENDKLIREVKVITLKSKLVSDFRKDFQFYKVREINNYHHAHDAYLNAV
VGTALIKKYPKLESEFVYGDYKVYDVRKMIAKSEQEGADKRTADGSEFES
PKKKRKV*

In the above sequence, the plain text denotes an adenosine deaminase sequence, bold sequence indicates sequence derived from Cas9, the italics sequence denotes a linker sequence, and the underlined sequence denotes a bipartite nuclear localization sequence.

[0597] In some embodiments, the base editor is ABE8.8-m, which comprises or consists essentially of the following sequence or a fragment thereof having adenosine deaminase activity:

ABE8.8-m
MSEVEFSHEYWMRHALTLAKRARDEREVPVGAVLVLNNRVIGEGWNRAIG
LHDPTAHAEIMALRQGGLVMQNYRLIDATLYVTFEPCVMCAGAMIHSRIG
RVVFGVRNAKTGAAGSLMDVLHHPGMNHRVEITEGILADECAALLCRFFR
MPRRVFNAQKKAQSSTDSGGSSGGSSGSETPGTSESATPESSGGSSGGSD
KKYSIGL [symbol] IGTNSVGWAVITDEYKVPSKKFKVLGNTDRHSIKKNLIGALL
FDSGETAEATRLKRTARRRYTRRKNRICYLQEIFSNEMAKVDDSFFHRLE
ESFLVEEDKKHERHPIFGNIVDEVAYHEKYPTIYHLRKKLVDSTDKADLR
LIYLALAHMIKFRGHFLIEGDLNPDNSDVDKLFIQLVQTYNQLFEENPIN
ASGVDAKAILSARLSKSRRLENLIAQLPGEKKNGLFGNLIALSLGLTPNF
KSNFDLAEDAKLQLSKDTYDDDLDNLLAQIGDQYADLFLAAKNLSDAILL
SDILRVNTEITKAPLSASMIKRYDEHHQDLTLLKALVRQQLPEKYKEIFF
DQSKNGYAGYIDGGASQEEFYKFIKPILEKMDGTEELLVKLNREDLLRKQ
RTFDNGSIPHQIHLGELHAILRRQEDFYPFLKDNREKIEKILTFRIPYYV
GPLARGNSRFAWMTRKSEETITPWNFEEVVDKGASAQSFIERMTNFDKNL
PNEKVLPKHSLLYEYFTVYNELTKVKYVTEGMRKPAFLSGEQKKAIVDLL
FKTNRKVTVKQLKEDYFKKIECFDSVEISGVEDRFNASLGTYHDLLKIIK
DKDFLDNEENEDILEDIVLTLTLFEDREMIEERLKTYAHLFDDKVMKQLK
RRRYTGWGRLSRKLINGIRDKQSGKTILDFLKSDGFANRNFMQLIHDDSL
TFKEDIQKAQVSGQGDSLHEHIANLAGSPAIKKGILQTVKVVDELVKVMG
RHKPENIVIEMARENQTTQKGQKNSRERMKRIEEGIKELGSQILKEHPVE
NTQLQNEKLYLYYLQNGRDMYVDQELDINRLSDYDVDHIVPQSFLKDDSI
DNKVLTRSDKNRGKSDNVPSEEVVKKMKNYWRQLLNAKLITQRKFDNLTK
AERGGLSELDKAGFIKRQLVETRQITKHVAQILDSRMNTKYDENDKLIRE
VKVITLKSKLVSDFRKDFQFYKVREINNYHHAHDAYLNAVVGTALIKKYP
KLESEFVYGDYKVYDVRKMIAKSEQEIGKATAKYFFYSNIMNFFKTEITL
ANGEIRKRPLIETNGETGEIVWDKGRDFATVRKVLSMPQVNIVKKTEVQT
GGFSKESILPKRNSDKLIARKKDWDPKKYGGFDSPTVAYSVLVVAKVEKG
KSKKLKSVKELLGITIMERSSFEKNPIDFLEAKGYKEVKKDLIIKLPKYS
LFELENGRKRMLASAGELQKGNELALPSKYVNFLYLASHYEKLKGSPEDN
EQKQLFVEQHKHYLDEIIEQISEFSKRVILADANLDKVLSAYNKHRDKPI
REQAENIIHLFTLTNLGAPAAFKYFDTTIDRKRYTSTKEVLDATLIHQSI
TGLYETRIDLSQLGGDEGADKRTADGSEFESPKKKRKV*

[0598] In the above sequence, the plain text denotes an adenosine deaminase sequence, bold sequence indicates sequence derived from Cas9, the italicized sequence denotes a linker sequence, underlined sequence denotes a bipartite nuclear localization sequence, and double underlined sequence indicates mutations.

[0599] In some embodiments, the base editor is ABE8.8-d, which comprises or consists essentially of the following sequence or a fragment thereof having adenosine deaminase activity:

ABE8.8-d
MSEVEFSHEYWMRHALTLAKRAWDEREVPVGAVLVHNNRVIGEGWNRPIG
RHDPTAHAEIMALRQGGLVMQNYRLIDATLYVTLEPCVMCAGAMIHSRIG
RVVFGARDAKTGAAGSLMDVLHHPGMNHRVEITEGILADECAALLSDFFR
MRRQEIKAQKKAQSSTDSGGSSGGSSGSETPGTSESATPESSGGSSGGSS
EVEFSHEYWMRHALTLAKRARDEREVPVGAVLVLNNRVIGEGWNRAIGLH
DPTAHAEIMALRQGGLVMQNYRLIDATLYVTFEPCVMCAGAMIHSRIGRV
VFGVRNAKTGAAGSLMDVLHHPGMNHRVEITEGILADECAALLCRFFRMP
RRVFNAQKKAQSSTDSGGSSGGSSGSETPGTSESATPESSGGSSGGSDKK
YSIGL [symbol] IGTNSVGWAVITDEYKVPSKKFKVLGNTDRHSIKKNLIGALLFD
SGETAEATRLKRTARRRYTRRKNRICYLQEIFSNEMAKVDDSFFHRLEES
FLVEEDKKHERHPIFGNIVDEVAYHEKYPTIYHLRKKLVDSTDKADLRLI
YLALAHMIKFRGHFLIEGDLNPDNSDVDKLFIQLVQTYNQLFEENPINAS
GVDAKAILSARLSKSRRLENLIAQLPGEKKNGLFGNLIALSLGLTPNFKS
NFDLAEDAKLQLSKDTYDDDLDNLLAQIGDQYADLFLAAKNLSDAILLSD
ILRVNTEITKAPLSASMIKRYDEHHQDLTLLKALVRQQLPEKYKEIFFDQ
SKNGYAGYIDGGASQEEFYKFIKPILEKMDGTEELLVKLNREDLLRKQRT
FDNGSIPHQIHLGELHAILRRQEDFYPFLKDNREKIEKILTFRIPYYVGP
LARGNSRFAWMTRKSEETITPWNFEEVVDKGASAQSFIERMTNFDKNLPN
EKVLPKHSLLYEYFTVYNELTKVKYVTEGMRKPAFLSGEQKKAIVDLLFK
TNRKVTVKQLKEDYFKKIECFDSVEISGVEDRFNASLGTYHDLLKIIKDK
DFLDNEENEDILEDIVLTLTLFEDREMIEERLKTYAHLFDDKVMKQLKRR
RYTGWGRLSRKLINGIRDKQSGKTILDFLKSDGFANRNFMQLIHDDSLTF
KEDIQKAQVSGQGDSLHEHIANLAGSPAIKKGILQTVKVVDELVKVMGRH
KPENIVIEMARENQTTQKGQKNSRERMKRIEEGIKELGSQILKEHPVENT
QLQNEKLYLYYLQNGRDMYVDQELDINRLSDYDVDHIVPQSFLKDDSIDN
KVLTRSDKNRGKSDNVPSEEVVKKMKNYWRQLLNAKLITQRKFDNLTKAE
RGGLSELDKAGFIKRQLVETRQITKHVAQILDSRMNTKYDENDKLIREVK
VITLKSKLVSDFRKDFQFYKVREINNYHHAHDAYLNAVVGTALIKKYPKL
ESEFVYGDYKVYDVRKMIAKSEQEIGKATAKYFFYSNIMNFFKTEITLAN
GEIRKRPLIETNGETGEIVWDKGRDFATVRKVLSMPQVNIVKKTEVQTGG
FSKESILPKRNSDKLIARKKDWDPKKYGGFDSPTVAYSVLVVAKVEKGKS
KKLKSVKELLGITIMERSSFEKNPIDFLEAKGYKEVKKDLIIKLPKYSLF
ELENGRKRMLASAGELQKGNELALPSKYVNFLYLASHYEKLKGSPEDNEQ
KQLFVEQHKHYLDEIIEQISEFSKRVILADANLDKVLSAYNKHRDKPIRE
QAENIIHLFTLTNLGAPAAFKYFDTTIDRKRYTSTKEVLDATLIHQSITG
LYETRIDLSQLGGDEGADKRTADGSEFESPKKKRKV*

[0600] In the above sequence, the plain text denotes an adenosine deaminase sequence, bold sequence indicates sequence derived from Cas9, the italicized sequence denotes a linker sequence, underlined sequence denotes a bipartite nuclear localization sequence, and double underlined sequence indicates mutations.

[0601] In some embodiments, the base editor is ABE8.13-m, which comprises or consists essentially of the following sequence or a fragment thereof having adenosine deaminase activity:

ABE8.13-m
MSEVEFSHEYWMRHALTLAKRARDEREVPVGAVLVLNNRVIGEGWNRAIG
LHDPTAHAEIMALRQGGLVMQNYRLYDATLYVTFEPCVMCAGAMIHSRIG
RVVFGVRNAKTGAAGSLMDVLHHPGMNHRVEITEGILADECAALLCRFFR
MPRRVFNAQKKAQSSTDSGGSSGGSSGSETPGTSESATPESSGGSSGGSD
KKYSIGL [symbol] IGTNSVGWAVITDEYKVPSKKFKVLGNTDRHSIKKNLIGALL
FDSGETAEATRLKRTARRRYTRRKNRICYLQEIFSNEMAKVDDSFFHRLE
ESFLVEEDKKHERHPIFGNIVDEVAYHEKYPTIYHLRKKLVDSTDKADLR
LIYLALAHMIKFRGHFLIEGDLNPDNSDVDKLFIQLVQTYNQLFEENPIN
ASGVDAKAILSARLSKSRRLENLIAQLPGEKKNGLFGNLIALSLGLTPNF
KSNFDLAEDAKLQLSKDTYDDDLDNLLAQIGDQYADLFLAAKNLSDAILL
SDILRVNTEITKAPLSASMIKRYDEHHQDLTLLKALVRQQLPEKYKEIFF
DQSKNGYAGYIDGGASQEEFYKFIKPILEKMDGTEELLVKLNREDLLRKQ
RTFDNGSIPHQIHLGELHAILRRQEDFYPFLKDNREKIEKILTFRIPYYV
GPLARGNSRFAWMTRKSEETITPWNFEEVVDKGASAQSFIERMTNFDKNL
PNEKVLPKHSLLYEYFTVYNELTKVKYVTEGMRKPAFLSGEQKKAIVDLL
FKTNRKVTVKQLKEDYFKKIECFDSVEISGVEDRFNASLGTYHDLLKIIK
DKDFLDNEENEDILEDIVLTLTLFEDREMIEERLKTYAHLFDDKVMKQLK
RRRYTGWGRLSRKLINGIRDKQSGKTILDFLKSDGFANRNFMQLIHDDSL
TFKEDIQKAQVSGQGDSLHEHIANLAGSPAIKKGILQTVKVVDELVKVMG
RHKPENIVIEMARENQTTQKGQKNSRERMKRIEEGIKELGSQILKEHPVE
NTQLQNEKLYLYYLQNGRDMYVDQELDINRLSDYDVDHIVPQSFLKDDSI
DNKVLTRSDKNRGKSDNVPSEEVVKKMKNYWRQLLNAKLITQRKFDNLTK
AERGGLSELDKAGFIKRQLVETRQITKHVAQILDSRMNTKYDENDKLIRE
VKVITLKSKLVSDFRKDFQFYKVREINNYHHAHDAYLNAVVGTALIKKYP
KLESEFVYGDYKVYDVRKMIAKSEQEIGKATAKYFFYSNIMNFFKTEITL
ANGEIRKRPLIETNGETGEIVWDKGRDFATVRKVLSMPQVNIVKKTEVQT
GGFSKESILPKRNSDKLIARKKDWDPKKYGGFDSPTVAYSVLVVAKVEKG
KSKKLKSVKELLGITIMERSSFEKNPIDFLEAKGYKEVKKDLIIKLPKYS
LFELENGRKRMLASAGELQKGNELALPSKYVNFLYLASHYEKLKGSPEDN
EQKQLFVEQHKHYLDEIIEQISEFSKRVILADANLDKVLSAYNKHRDKPI
REQAENIIHLFTLTNLGAPAAFKYFDTTIDRKRYTSTKEVLDATLIHQSI
TGLYETRIDLSQLGGDEGADKRTADGSEFESPKKKRKV*

[0602] In the above sequence, the plain text denotes an adenosine deaminase sequence, bold sequence indicates sequence derived from Cas9, the italicized sequence denotes a linker sequence, underlined sequence denotes a bipartite nuclear localization sequence, and double underlined sequence indicates mutations.

[0603] In some embodiments, the base editor is ABE8.13-d, which comprises or consists essentially of the following sequence or a fragment thereof having adenosine deaminase activity:

ABE8.13-d
MSEVEFSHEYWMRHALTLAKRAWDEREVPVGAVLVHNNRVIGEGWNRPIG
RHDPTAHAEIMALRQGGLVMQNYRLIDATLYVTLEPCVMCAGAMIHSRIG
RVVFGARDAKTGAAGSLMDVLHHPGMNHRVEITEGILADECAALLSDFFR
MRRQEIKAQKKAQSSTDSGGSSGGSSGSETPGTSESATPESSGGSSGGSS
EVEFSHEYWMRHALTLAKRARDEREVPVGAVLVLNNRVIGEGWNRAIGLH
DPTAHAEIMALRQGGLVMQNYRLYDATLYVTFEPCVMCAGAMIHSRIGRV
VFGVRNAKTGAAGSLMDVLHHPGMNHRVEITEGILADECAALLCRFFRMP
RRVFNAQKKAQSSTDSGGSSGGSSGSETPGTSESATPESSGGSSGGSDKK
YSIGL [symbol] IGTNSVGWAVITDEYKVPSKKFKVLGNTDRHSIKKNLIGALLFD
SGETAEATRLKRTARRRYTRRKNRICYLQEIFSNEMAKVDDSFFHRLEES
FLVEEDKKHERHPIFGNIVDEVAYHEKYPTIYHLRKKLVDSTDKADLRLI
YLALAHMIKFRGHFLIEGDLNPDNSDVDKLFIQLVQTYNQLFEENPINAS
GVDAKAILSARLSKSRRLENLIAQLPGEKKNGLFGNLIALSLGLTPNFKS
NFDLAEDAKLQLSKDTYDDDLDNLLAQIGDQYADLFLAAKNLSDAILLSD
ILRVNTEITKAPLSASMIKRYDEHHQDLTLLKALVRQQLPEKYKEIFFDQ
SKNGYAGYIDGGASQEEFYKFIKPILEKMDGTEELLVKLNREDLLRKQRT
FDNGSIPHQIHLGELHAILRRQEDFYPFLKDNREKIEKILTFRIPYYVGP
LARGNSRFAWMTRKSEETITPWNFEEVVDKGASAQSFIERMTNFDKNLPN
EKVLPKHSLLYEYFTVYNELTKVKYVTEGMRKPAFLSGEQKKAIVDLLFK
TNRKVTVKQLKEDYFKKIECFDSVEISGVEDRFNASLGTYHDLLKIIKDK
DFLDNEENEDILEDIVLTLTLFEDREMIEERLKTYAHLFDDKVMKQLKRR
RYTGWGRLSRKLINGIRDKQSGKTILDFLKSDGFANRNFMQLIHDDSLTF
KEDIQKAQVSGQGDSLHEHIANLAGSPAIKKGILQTVKVVDELVKVMGRH
KPENIVIEMARENQTTQKGQKNSRERMKRIEEGIKELGSQILKEHPVENT
QLQNEKLYLYYLQNGRDMYVDQELDINRLSDYDVDHIVPQSFLKDDSIDN
KVLTRSDKNRGKSDNVPSEEVVKKMKNYWRQLLNAKLITQRKFDNLTKAE
RGGLSELDKAGFIKRQLVETRQITKHVAQILDSRMNTKYDENDKLIREVK
VITLKSKLVSDFRKDFQFYKVREINNYHHAHDAYLNAVVGTALIKKYPKL
ESEFVYGDYKVYDVRKMIAKSEQEIGKATAKYFFYSNIMNFFKTEITLAN
GEIRKRPLIETNGETGEIVWDKGRDFATVRKVLSMPQVNIVKKTEVQTGG
FSKESILPKRNSDKLIARKKDWDPKKYGGFDSPTVAYSVLVVAKVEKGKS
KKLKSVKELLGITIMERSSFEKNPIDFLEAKGYKEVKKDLIIKLPKYSLF
ELENGRKRMLASAGELQKGNELALPSKYVNFLYLASHYEKLKGSPEDNEQ
KQLFVEQHKHYLDEIIEQISEFSKRVILADANLDKVLSAYNKHRDKPIRE
QAENIIHLFTLTNLGAPAAFKYFDTTIDRKRYTSTKEVLDATLIHQSITG
LYETRIDLSQLGGDEGADKRTADGSEFESPKKKRKV*

[0604] In the above sequence, the plain text denotes an adenosine deaminase sequence, bold sequence indicates sequence derived from Cas9, the italicized sequence denotes a linker sequence, underlined sequence denotes a bipartite nuclear localization sequence, and double underlined sequence indicates mutations.

[0605] In some embodiments, the base editor is ABE8.17-m, which comprises or consists essentially of the following sequence or a fragment thereof having adenosine deaminase activity:

ABE8.17-m
MSEVEFSHEYWMRHALTLAKRARDEREVPVGAVLVLNNRVIGEGWNRAIG
LHDPTAHAEIMALRQGGLVMQNYRLIDATLYSTFEPCVMCAGAMIHSRIG
RVVFGVRNAKTGAAGSLMDVLHYPGMNHRVEITEGILADECAALLCYFFR
MPRRVFNAQKKAQSSTDSGGSSGGSSGSETPGTSESATPESSGGSSGGSD
KKYSIGL [symbol] IGTNSVGWAVITDEYKVPSKKFKVLGNTDRHSIKKNLIGALL
FDSGETAEATRLKRTARRRYTRRKNRICYLQEIFSNEMAKVDDSFFHRLE
ESFLVEEDKKHERHPIFGNIVDEVAYHEKYPTIYHLRKKLVDSTDKADLR
LIYLALAHMIKFRGHFLIEGDLNPDNSDVDKLFIQLVQTYNQLFEENPIN
ASGVDAKAILSARLSKSRRLENLIAQLPGEKKNGLFGNLIALSLGLTPNF
KSNFDLAEDAKLQLSKDTYDDDLDNLLAQIGDQYADLFLAAKNLSDAILL
SDILRVNTEITKAPLSASMIKRYDEHHQDLTLLKALVRQQLPEKYKEIFF
DQSKNGYAGYIDGGASQEEFYKFIKPILEKMDGTEELLVKLNREDLLRKQ
RTFDNGSIPHQIHLGELHAILRRQEDFYPFLKDNREKIEKILTFRIPYYV
GPLARGNSRFAWMTRKSEETITPWNFEEVVDKGASAQSFIERMTNFDKNL
PNEKVLPKHSLLYEYFTVYNELTKVKYVTEGMRKPAFLSGEQKKAIVDLL
FKTNRKVTVKQLKEDYFKKIECFDSVEISGVEDRFNASLGTYHDLLKIIK
DKDFLDNEENEDILEDIVLTLTLFEDREMIEERLKTYAHLFDDKVMKQLK
RRRYTGWGRLSRKLINGIRDKQSGKTILDFLKSDGFANRNFMQLIHDDSL
TFKEDIQKAQVSGQGDSLHEHIANLAGSPAIKKGILQTVKVVDELVKVMG
RHKPENIVIEMARENQTTQKGQKNSRERMKRIEEGIKELGSQILKEHPVE
NTQLQNEKLYLYYLQNGRDMYVDQELDINRLSDYDVDHIVPQSFLKDDSI
DNKVLTRSDKNRGKSDNVPSEEVVKKMKNYWRQLLNAKLITQRKFDNLTK
AERGGLSELDKAGFIKRQLVETRQITKHVAQILDSRMNTKYDENDKLIRE
VKVITLKSKLVSDFRKDFQFYKVREINNYHHAHDAYLNAVVGTALIKKYP
KLESEFVYGDYKVYDVRKMIAKSEQEIGKATAKYFFYSNIMNFFKTEITL
ANGEIRKRPLIETNGETGEIVWDKGRDFATVRKVLSMPQVNIVKKTEVQT
GGFSKESILPKRNSDKLIARKKDWDPKKYGGFDSPTVAYSVLVVAKVEKG
KSKKLKSVKELLGITIMERSSFEKNPIDFLEAKGYKEVKKDLIIKLPKYS
LFELENGRKRMLASAGELQKGNELALPSKYVNFLYLASHYEKLKGSPEDN
EQKQLFVEQHKHYLDEIIEQISEFSKRVILADANLDKVLSAYNKHRDKPI
REQAENIIHLFTLTNLGAPAAFKYFDTTIDRKRYTSTKEVLDATLIHQSI
TGLYETRIDLSQLGGDEGADKRTADGSEFESPKKKRKV*

[0606] In the above sequence, the plain text denotes an adenosine deaminase sequence, bold sequence indicates sequence derived from Cas9, the italicized sequence denotes a linker sequence, underlined sequence denotes a bipartite nuclear localization sequence, and double underlined sequence indicates mutations.

[0607] In some embodiments, the base editor is ABE8.17-d, which comprises or consists essentially of the following sequence or a fragment thereof having adenosine deaminase activity:

ABE8.17-d
MSEVEFSHEYWMRHALTLAKRAWDEREVPVGAVLVHNNRVIGEGWNRPIG
RHDPTAHAEIMALRQGGLVMQNYRLIDATLYVTLEPCVMCAGAMIHSRIG
RVVFGARDAKTGAAGSLMDVLHHPGMNHRVEITEGILADECAALLSDFFR
MRRQEIKAQKKAQSSTDSGGSSGGSSGSETPGTSESATPESSGGSSGGSS
EVEFSHEYWMRHALTLAKRARDEREVPVGAVLVLNNRVIGEGWNRAIGLH
DPTAHAEIMALRQGGLVMQNYRLIDATLYSTFEPCVMCAGAMIHSRIGRV
VFGVRNAKTGAAGSLMDVLHYPGMNHRVEITEGILADECAALLCYFFRMP
RRVFNAQKKAQSSTDSGGSSGGSSGSETPGTSESATPESSGGSSGGSDKK
YSIGL [symbol] IGTNSVGWAVITDEYKVPSKKFKVLGNTDRHSIKKNLIGALLFD
SGETAEATRLKRTARRRYTRRKNRICYLQEIFSNEMAKVDDSFFHRLEES
FLVEEDKKHERHPIFGNIVDEVAYHEKYPTIYHLRKKLVDSTDKADLRLI
YLALAHMIKFRGHFLIEGDLNPDNSDVDKLFIQLVQTYNQLFEENPINAS
GVDAKAILSARLSKSRRLENLIAQLPGEKKNGLFGNLIALSLGLTPNFKS
NFDLAEDAKLQLSKDTYDDDLDNLLAQIGDQYADLFLAAKNLSDAILLSD
ILRVNTEITKAPLSASMIKRYDEHHQDLTLLKALVRQQLPEKYKEIFFDQ
SKNGYAGYIDGGASQEEFYKFIKPILEKMDGTEELLVKLNREDLLRKQRT
FDNGSIPHQIHLGELHAILRRQEDFYPFLKDNREKIEKILTFRIPYYVGP
LARGNSRFAWMTRKSEETITPWNFEEVVDKGASAQSFIERMTNFDKNLPN
EKVLPKHSLLYEYFTVYNELTKVKYVTEGMRKPAFLSGEQKKAIVDLLFK
TNRKVTVKQLKEDYFKKIECFDSVEISGVEDRFNASLGTYHDLLKIIKDK
DFLDNEENEDILEDIVLTLTLFEDREMIEERLKTYAHLFDDKVMKQLKRR
RYTGWGRLSRKLINGIRDKQSGKTILDFLKSDGFANRNFMQLIHDDSLTF
KEDIQKAQVSGQGDSLHEHIANLAGSPAIKKGILQTVKVVDELVKVMGRH
KPENIVIEMARENQTTQKGQKNSRERMKRIEEGIKELGSQILKEHPVENT
QLQNEKLYLYYLQNGRDMYVDQELDINRLSDYDVDHIVPQSFLKDDSIDN
KVLTRSDKNRGKSDNVPSEEVVKKMKNYWRQLLNAKLITQRKFDNLTKAE
RGGLSELDKAGFIKRQLVETRQITKHVAQILDSRMNTKYDENDKLIREVK
VITLKSKLVSDFRKDFQFYKVREINNYHHAHDAYLNAVVGTALIKKYPKL
ESEFVYGDYKVYDVRKMIAKSEQEIGKATAKYFFYSNIMNFFKTEITLAN
GEIRKRPLIETNGETGEIVWDKGRDFATVRKVLSMPQVNIVKKTEVQTGG
FSKESILPKRNSDKLIARKKDWDPKKYGGFDSPTVAYSVLVVAKVEKGKS
KKLKSVKELLGITIMERSSFEKNPIDFLEAKGYKEVKKDLIIKLPKYSLF
ELENGRKRMLASAGELQKGNELALPSKYVNFLYLASHYEKLKGSPEDNEQ
KQLFVEQHKHYLDEIIEQISEFSKRVILADANLDKVLSAYNKHRDKPIRE
QAENIIHLFTLTNLGAPAAFKYFDTTIDRKRYTSTKEVLDATLIHQSITG
LYETRIDLSQLGGDEGADKRTADGSEFESPKKKRKV*

[0608] In the above sequence, the plain text denotes an adenosine deaminase sequence, bold sequence indicates sequence derived from Cas9, the italicized sequence denotes a linker sequence, underlined sequence denotes a bipartite nuclear localization sequence, and double underlined sequence indicates mutations.

[0609] In some embodiments, the base editor is ABE8.20-m, which comprises or consists essentially of the following sequence or a fragment thereof having adenosine deaminase activity:

ABE8.20-m
MSEVEFSHEYWMRHALTLAKRARDEREVPVGAVLVLNNRVIGEGWNRAIG
LHDPTAHAEIMALRQGGLVMQNYRLYDATLYSTFEPCVMCAGAMIHSRIG
RVVFGVRNAKTGAAGSLMDVLHHPGMNHRVEITEGILADECAALLCRFFR
MPRRVFNAQKKAQSSTDSGGSSGGSSGSETPGTSESATPESSGGSSGGSD
KKYSIGL [symbol] IGTNSVGWAVITDEYKVPSKKFKVLGNTDRHSIKKNLIGALL
FDSGETAEATRLKRTARRRYTRRKNRICYLQEIFSNEMAKVDDSFFHRLE
ESFLVEEDKKHERHPIFGNIVDEVAYHEKYPTIYHLRKKLVDSTDKADLR
LIYLALAHMIKFRGHFLIEGDLNPDNSDVDKLFIQLVQTYNQLFEENPIN
ASGVDAKAILSARLSKSRRLENLIAQLPGEKKNGLFGNLIALSLGLTPNF
KSNFDLAEDAKLQLSKDTYDDDLDNLLAQIGDQYADLFLAAKNLSDAILL
SDILRVNTEITKAPLSASMIKRYDEHHQDLTLLKALVRQQLPEKYKEIFF
DQSKNGYAGYIDGGASQEEFYKFIKPILEKMDGTEELLVKLNREDLLRKQ
RTFDNGSIPHQIHLGELHAILRRQEDFYPFLKDNREKIEKILTFRIPYYV
GPLARGNSRFAWMTRKSEETITPWNFEEVVDKGASAQSFIERMTNFDKNL
PNEKVLPKHSLLYEYFTVYNELTKVKYVTEGMRKPAFLSGEQKKAIVDLL
FKTNRKVTVKQLKEDYFKKIECFDSVEISGVEDRFNASLGTYHDLLKIIK
DKDFLDNEENEDILEDIVLTLTLFEDREMIEERLKTYAHLFDDKVMKQLK
RRRYTGWGRLSRKLINGIRDKQSGKTILDFLKSDGFANRNFMQLIHDDSL
TFKEDIQKAQVSGQGDSLHEHIANLAGSPAIKKGILQTVKVVDELVKVMG
RHKPENIVIEMARENQTTQKGQKNSRERMKRIEEGIKELGSQILKEHPVE
NTQLQNEKLYLYYLQNGRDMYVDQELDINRLSDYDVDHIVPQSFLKDDSI
DNKVLTRSDKNRGKSDNVPSEEVVKKMKNYWRQLLNAKLITQRKFDNLTK
AERGGLSELDKAGFIKRQLVETRQITKHVAQILDSRMNTKYDENDKLIRE
VKVITLKSKLVSDFRKDFQFYKVREINNYHHAHDAYLNAVVGTALIKKYP
KLESEFVYGDYKVYDVRKMIAKSEQEIGKATAKYFFYSNIMNFFKTEITL
ANGEIRKRPLIETNGETGEIVWDKGRDFATVRKVLSMPQVNIVKKTEVQT
GGFSKESILPKRNSDKLIARKKDWDPKKYGGFDSPTVAYSVLVVAKVEKG
KSKKLKSVKELLGITIMERSSFEKNPIDFLEAKGYKEVKKDLIIKLPKYS
LFELENGRKRMLASAGELQKGNELALPSKYVNFLYLASHYEKLKGSPEDN
EQKQLFVEQHKHYLDEIIEQISEFSKRVILADANLDKVLSAYNKHRDKPI
REQAENIIHLFTLTNLGAPAAFKYFDTTIDRKRYTSTKEVLDATLIHQSI
TGLYETRIDLSQLGGDEGADKRTADGSEFESPKKKRKV*

[0610] In the above sequence, the plain text denotes an adenosine deaminase sequence, bold sequence indicates sequence derived from Cas9, the italicized sequence denotes a linker sequence, underlined sequence denotes a bipartite nuclear localization sequence, and double underlined sequence indicates mutations.

[0611] In some embodiments, the base editor is ABE8.20-d, which comprises or consists essentially of the following sequence or a fragment thereof having adenosine deaminase activity:

ABE8.20-d
MSEVEFSHEYWMRHALTLAKRAWDEREVPVGAVLVHNNRVIGEGWNRPIG
RHDPTAHAEIMALRQGGLVMQNYRLIDATLYVTLEPCVMCAGAMIHSRIG
RVVFGARDAKTGAAGSLMDVLHHPGMNHRVEITEGILADECAALLSDFFR
MRRQEIKAQKKAQSSTDSGGSSGGSSGSETPGTSESATPESSGGSSGGSS
EVEFSHEYWMRHALTLAKRARDEREVPVGAVLVLNNRVIGEGWNRAIGLH
DPTAHAEIMALRQGGLVMQNYRLYDATLYSTFEPCVMCAGAMIHSRIGRV
VFGVRNAKTGAAGSLMDVLHHPGMNHRVEITEGILADECAALLCRFFRMP
RRVFNAQKKAQSSTDSGGSSGGSSGSETPGTSESATPESSGGSSGGSDKK
YSIGL [symbol] IGTNSVGWAVITDEYKVPSKKFKVLGNTDRHSIKKNLIGALLFD
SGETAEATRLKRTARRRYTRRKNRICYLQEIFSNEMAKVDDSFFHRLEES
FLVEEDKKHERHPIFGNIVDEVAYHEKYPTIYHLRKKLVDSTDKADLRLI
YLALAHMIKFRGHFLIEGDLNPDNSDVDKLFIQLVQTYNQLFEENPINAS
GVDAKAILSARLSKSRRLENLIAQLPGEKKNGLFGNLIALSLGLTPNFKS
NFDLAEDAKLQLSKDTYDDDLDNLLAQIGDQYADLFLAAKNLSDAILLSD
ILRVNTEITKAPLSASMIKRYDEHHQDLTLLKALVRQQLPEKYKEIFFDQ
SKNGYAGYIDGGASQEEFYKFIKPILEKMDGTEELLVKLNREDLLRKQRT
FDNGSIPHQIHLGELHAILRRQEDFYPFLKDNREKIEKILTFRIPYYVGP
LARGNSRFAWMTRKSEETITPWNFEEVVDKGASAQSFIERMTNFDKNLPN
EKVLPKHSLLYEYFTVYNELTKVKYVTEGMRKPAFLSGEQKKAIVDLLFK
TNRKVTVKQLKEDYFKKIECFDSVEISGVEDRFNASLGTYHDLLKIIKDK
DFLDNEENEDILEDIVLTLTLFEDREMIEERLKTYAHLFDDKVMKQLKRR
RYTGWGRLSRKLINGIRDKQSGKTILDFLKSDGFANRNFMQLIHDDSLTF
KEDIQKAQVSGQGDSLHEHIANLAGSPAIKKGILQTVKVVDELVKVMGRH
KPENIVIEMARENQTTQKGQKNSRERMKRIEEGIKELGSQILKEHPVENT
QLQNEKLYLYYLQNGRDMYVDQELDINRLSDYDVDHIVPQSFLKDDSIDN
KVLTRSDKNRGKSDNVPSEEVVKKMKNYWRQLLNAKLITQRKFDNLTKAE
RGGLSELDKAGFIKRQLVETRQITKHVAQILDSRMNTKYDENDKLIREVK
VITLKSKLVSDFRKDFQFYKVREINNYHHAHDAYLNAVVGTALIKKYPKL
ESEFVYGDYKVYDVRKMIAKSEQEIGKATAKYFFYSNIMNFFKTEITLAN
GEIRKRPLIETNGETGEIVWDKGRDFATVRKVLSMPQVNIVKKTEVQTGG
FSKESILPKRNSDKLIARKKDWDPKKYGGFDSPTVAYSVLVVAKVEKGKS
KKLKSVKELLGITIMERSSFEKNPIDFLEAKGYKEVKKDLIIKLPKYSLF
ELENGRKRMLASAGELQKGNELALPSKYVNFLYLASHYEKLKGSPEDNEQ
KQLFVEQHKHYLDEIIEQISEFSKRVILADANLDKVLSAYNKHRDKPIRE
QAENIIHLFTLTNLGAPAAFKYFDTTIDRKRYTSTKEVLDATLIHQSITG
LYETRIDLSQLGGDEGADKRTADGSEFESPKKKRKV*

[0612] In the above sequence, the plain text denotes an adenosine deaminase sequence, bold sequence indicates sequence derived from Cas9, the italicized sequence denotes a linker sequence, underlined sequence denotes a bipartite nuclear localization sequence, and double underlined sequence indicates mutations.

[0613] In some embodiments, an ABE8 of the invention is selected from the following sequences:

01. monoABE8.1_bpNLS + Y147T
MSEVEFSHEYWMRHALTLAKRARDEREVPVGAVLVLNNRVIGEGWNRAIGLHDPTAHAEIMA
LRQGGLVMQNYRLIDATLYVTFEPCVMCAGAMIHSRIGRVVFGVRNAKTGAAGSLMDVLHYP
GMNHRVEITEGILADECAALLCTFFRMPRQVFNAQKKAQSSTDSGGSSGGSSGSETPGTSES
ATPESSGGSSGGSDKKYSIGLAIGTNSVGWAVITDEYKVPSKKFKVLGNTDRHSIKKNLIGA
LLFDSGETAEATRLKRTARRRYTRRKNRICYLQEIFSNEMAKVDDSFFHRLEESFLVEEDKK
HERHPIFGNIVDEVAYHEKYPTIYHLRKKLVDSTDKADLRLIYLALAHMIKFRGHFLIEGDL
NPDNSDVDKLFIQLVQTYNQLFEENPINASGVDAKAILSARLSKSRRLENLIAQLPGEKKNG
LFGNLIALSLGLTPNFKSNFDLAEDAKLQLSKDTYDDDLDNLLAQIGDQYADLFLAAKNLSD
AILLSDILRVNTEITKAPLSASMIKRYDEHHQDLTLLKALVRQQLPEKYKEIFFDQSKNGYA
GYIDGGASQEEFYKFIKPILEKMDGTEELLVKLNREDLLRKQRTFDNGSIPHQIHLGELHAI
LRRQEDFYPFLKDNREKIEKILTFRIPYYVGPLARGNSRFAWMTRKSEETITPWNFEEVVDK
GASAQSFIERMTNFDKNLPNEKVLPKHSLLYEYFTVYNELTKVKYVTEGMRKPAFLSGEQKK
AIVDLLFKTNRKVTVKQLKEDYFKKIECFDSVEISGVEDRFNASLGTYHDLLKIIKDKDFLD
NEENEDILEDIVLTLTLFEDREMIEERLKTYAHLFDDKVMKQLKRRRYTGWGRLSRKLINGI
RDKQSGKTILDFLKSDGFANRNFMQLIHDDSLTFKEDIQKAQVSGQGDSLHEHIANLAGSPA
IKKGILQTVKVVDELVKVMGRHKPENIVIEMARENQTTQKGQKNSRERMKRIEEGIKELGSQ
ILKEHPVENTQLQNEKLYLYYLQNGRDMYVDQELDINRLSDYDVDHIVPQSFLKDDSIDNKV
LTRSDKNRGKSDNVPSEEVVKKMKNYWRQLLNAKLITQRKFDNLTKAERGGLSELDKAGFIK
RQLVETRQITKHVAQILDSRMNTKYDENDKLIREVKVITLKSKLVSDFRKDFQFYKVREINN
YHHAHDAYLNAVVGTALIKKYPKLESEFVYGDYKVYDVRKMIAKSEQEIGKATAKYFFYSNI
MNFFKTEITLANGEIRKRPLIETNGETGEIVWDKGRDFATVRKVLSMPQVNIVKKTEVQTGG
FSKESILPKRNSDKLIARKKDWDPKKYGGFVSPTVAYSVLVVAKVEKGKSKKLKSVKELLGI
TIMERSSFEKNPIDFLEAKGYKEVKKDLIIKLPKYSLFELENGRKRMLASARELQKGNELAL
PSKYVNFLYLASHYEKLKGSPEDNEQKQLFVEQHKHYLDEIIEQISEFSKRVILADANLDKV
LSAYNKHRDKPIREQAENIIHLFTLTNLGAPAAFKYFDTTIDRKQYRSTKEVLDATLIHQSI
TGLYETRIDLSQLGGDEGADKRTADGSEFESPKKKRKV
02. monoABE8.1_bpNLS + Y147R
MSEVEFSHEYWMRHALTLAKRARDEREVPVGAVLVLNNRVIGEGWNRAIGLHDPTAHAEIMA
LRQGGLVMQNYRLIDATLYVTFEPCVMCAGAMIHSRIGRVVFGVRNAKTGAAGSLMDVLHYP
GMNHRVEITEGILADECAALLCRFFRMPRQVFNAQKKAQSSTDSGGSSGGSSGSETPGTSES
ATPESSGGSSGGSDKKYSIGLAIGTNSVGWAVITDEYKVPSKKFKVLGNTDRHSIKKNLIGA
LLFDSGETAEATRLKRTARRRYTRRKNRICYLQEIFSNEMAKVDDSFFHRLEESFLVEEDKK
HERHPIFGNIVDEVAYHEKYPTIYHLRKKLVDSTDKADLRLIYLALAHMIKFRGHFLIEGDL
NPDNSDVDKLFIQLVQTYNQLFEENPINASGVDAKAILSARLSKSRRLENLIAQLPGEKKNG
LFGNLIALSLGLTPNFKSNFDLAEDAKLQLSKDTYDDDLDNLLAQIGDQYADLFLAAKNLSD
AILLSDILRVNTEITKAPLSASMIKRYDEHHQDLTLLKALVRQQLPEKYKEIFFDQSKNGYA
GYIDGGASQEEFYKFIKPILEKMDGTEELLVKLNREDLLRKQRTFDNGSIPHQIHLGELHAI
LRRQEDFYPFLKDNREKIEKILTFRIPYYVGPLARGNSRFAWMTRKSEETITPWNFEEVVDK
GASAQSFIERMTNFDKNLPNEKVLPKHSLLYEYFTVYNELTKVKYVTEGMRKPAFLSGEQKK
AIVDLLFKTNRKVTVKQLKEDYFKKIECFDSVEISGVEDRFNASLGTYHDLLKIIKDKDFLD
NEENEDILEDIVLTLTLFEDREMIEERLKTYAHLFDDKVMKQLKRRRYTGWGRLSRKLINGI
RDKQSGKTILDFLKSDGFANRNFMQLIHDDSLTFKEDIQKAQVSGQGDSLHEHIANLAGSPA
IKKGILQTVKVVDELVKVMGRHKPENIVIEMARENQTTQKGQKNSRERMKRIEEGIKELGSQ
ILKEHPVENTQLQNEKLYLYYLQNGRDMYVDQELDINRLSDYDVDHIVPQSFLKDDSIDNKV
LTRSDKNRGKSDNVPSEEVVKKMKNYWRQLLNAKLITQRKFDNLTKAERGGLSELDKAGFIK
RQLVETRQITKHVAQILDSRMNTKYDENDKLIREVKVITLKSKLVSDFRKDFQFYKVREINN
YHHAHDAYLNAVVGTALIKKYPKLESEFVYGDYKVYDVRKMIAKSEQEIGKATAKYFFYSNI
MNFFKTEITLANGEIRKRPLIETNGETGEIVWDKGRDFATVRKVLSMPQVNIVKKTEVQTGG
FSKESILPKRNSDKLIARKKDWDPKKYGGFVSPTVAYSVLVVAKVEKGKSKKLKSVKELLGI
TIMERSSFEKNPIDFLEAKGYKEVKKDLIIKLPKYSLFELENGRKRMLASARELQKGNELAL
PSKYVNFLYLASHYEKLKGSPEDNEQKQLFVEQHKHYLDEIIEQISEFSKRVILADANLDKV
LSAYNKHRDKPIREQAENIIHLFTLTNLGAPAAFKYFDTTIDRKQYRSTKEVLDATLIHQSI
TGLYETRIDLSQLGGDEGADKRTADGSEFESPKKKRKV
03. monoABE8.1_bpNLS + Q154S
MSEVEFSHEYWMRHALTLAKRARDEREVPVGAVLVLNNRVIGEGWNRAIGLHDPTAHAEIMA
LRQGGLVMQNYRLIDATLYVTFEPCVMCAGAMIHSRIGRVVFGVRNAKTGAAGSLMDVLHYP
GMNHRVEITEGILADECAALLCYEFRMPRSVFNAQKKAQSSTDSGGSSGGSSGSETPGTSES
ATPESSGGSSGGSDKKYSIGLAIGTNSVGWAVITDEYKVPSKKFKVLGNTDRHSIKKNLIGA
LLFDSGETAEATRLKRTARRRYTRRKNRICYLQEIFSNEMAKVDDSFFHRLEESFLVEEDKK
HERHPIFGNIVDEVAYHEKYPTIYHLRKKLVDSTDKADLRLIYLALAHMIKFRGHFLIEGDL
NPDNSDVDKLFIQLVQTYNQLFEENPINASGVDAKAILSARLSKSRRLENLIAQLPGEKKNG
LFGNLIALSLGLTPNFKSNFDLAEDAKLQLSKDTYDDDLDNLLAQIGDQYADLFLAAKNLSD
AILLSDILRVNTEITKAPLSASMIKRYDEHHQDLTLLKALVRQQLPEKYKEIFFDQSKNGYA
GYIDGGASQEEFYKFIKPILEKMDGTEELLVKLNREDLLRKQRTFDNGSIPHQIHLGELHAI
LRRQEDFYPFLKDNREKIEKILTFRIPYYVGPLARGNSRFAWMTRKSEETITPWNFEEVVDK
GASAQSFIERMTNFDKNLPNEKVLPKHSLLYEYFTVYNELTKVKYVTEGMRKPAFLSGEQKK
AIVDLLFKTNRKVTVKQLKEDYFKKIECFDSVEISGVEDRFNASLGTYHDLLKIIKDKDFLD
NEENEDILEDIVLTLTLFEDREMIEERLKTYAHLFDDKVMKQLKRRRYTGWGRLSRKLINGI
RDKQSGKTILDFLKSDGFANRNFMQLIHDDSLTFKEDIQKAQVSGQGDSLHEHIANLAGSPA
IKKGILQTVKVVDELVKVMGRHKPENIVIEMARENQTTQKGQKNSRERMKRIEEGIKELGSQ
ILKEHPVENTQLQNEKLYLYYLQNGRDMYVDQELDINRLSDYDVDHIVPQSFLKDDSIDNKV
LTRSDKNRGKSDNVPSEEVVKKMKNYWRQLLNAKLITQRKFDNLTKAERGGLSELDKAGFIK
RQLVETRQITKHVAQILDSRMNTKYDENDKLIREVKVITLKSKLVSDFRKDFQFYKVREINN
YHHAHDAYLNAVVGTALIKKYPKLESEFVYGDYKVYDVRKMIAKSEQEIGKATAKYFFYSNI
MNFFKTEITLANGEIRKRPLIETNGETGEIVWDKGRDFATVRKVLSMPQVNIVKKTEVQTGG
FSKESILPKRNSDKLIARKKDWDPKKYGGFVSPTVAYSVLVVAKVEKGKSKKLKSVKELLGI
TIMERSSFEKNPIDFLEAKGYKEVKKDLIIKLPKYSLFELENGRKRMLASARELQKGNELAL
PSKYVNFLYLASHYEKLKGSPEDNEQKQLFVEQHKHYLDEIIEQISEFSKRVILADANLDKV
LSAYNKHRDKPIREQAENIIHLFTLTNLGAPAAFKYFDTTIDRKQYRSTKEVLDATLIHQSI
TGLYETRIDLSQLGGDEGADKRTADGSEFESPKKKRKV
04. monoABE8.1_bpNLS + Y123H
MSEVEFSHEYWMRHALTLAKRARDEREVPVGAVLVLNNRVIGEGWNRAIGLHDPTAHAEIMA
LRQGGLVMQNYRLIDATLYVTFEPCVMCAGAMIHSRIGRVVFGVRNAKTGAAGSLMDVLHHP
GMNHRVEITEGILADECAALLCYFFRMPRQVFNAQKKAQSSTDSGGSSGGSSGSETPGTSES
ATPESSGGSSGGSDKKYSIGLAIGTNSVGWAVITDEYKVPSKKFKVLGNTDRHSIKKNLIGA
LLFDSGETAEATRLKRTARRRYTRRKNRICYLQEIFSNEMAKVDDSFFHRLEESFLVEEDKK
HERHPIFGNIVDEVAYHEKYPTIYHLRKKLVDSTDKADLRLIYLALAHMIKFRGHFLIEGDL
NPDNSDVDKLFIQLVQTYNQLFEENPINASGVDAKAILSARLSKSRRLENLIAQLPGEKKNG
LFGNLIALSLGLTPNFKSNFDLAEDAKLQLSKDTYDDDLDNLLAQIGDQYADLFLAAKNLSD
AILLSDILRVNTEITKAPLSASMIKRYDEHHQDLTLLKALVRQQLPEKYKEIFFDQSKNGYA
GYIDGGASQEEFYKFIKPILEKMDGTEELLVKLNREDLLRKQRTFDNGSIPHQIHLGELHAI
LRRQEDFYPFLKDNREKIEKILTFRIPYYVGPLARGNSRFAWMTRKSEETITPWNFEEVVDK
GASAQSFIERMTNFDKNLPNEKVLPKHSLLYEYFTVYNELTKVKYVTEGMRKPAFLSGEQKK
AIVDLLFKTNRKVTVKQLKEDYFKKIECFDSVEISGVEDRFNASLGTYHDLLKIIKDKDFLD
NEENEDILEDIVLTLTLFEDREMIEERLKTYAHLFDDKVMKQLKRRRYTGWGRLSRKLINGI
RDKQSGKTILDFLKSDGFANRNFMQLIHDDSLTFKEDIQKAQVSGQGDSLHEHIANLAGSPA
IKKGILQTVKVVDELVKVMGRHKPENIVIEMARENQTTQKGQKNSRERMKRIEEGIKELGSQ
ILKEHPVENTQLQNEKLYLYYLQNGRDMYVDQELDINRLSDYDVDHIVPQSFLKDDSIDNKV
LTRSDKNRGKSDNVPSEEVVKKMKNYWRQLLNAKLITQRKFDNLTKAERGGLSELDKAGFIK
RQLVETRQITKHVAQILDSRMNTKYDENDKLIREVKVITLKSKLVSDFRKDFQFYKVREINN
YHHAHDAYLNAVVGTALIKKYPKLESEFVYGDYKVYDVRKMIAKSEQEIGKATAKYFFYSNI
MNFFKTEITLANGEIRKRPLIETNGETGEIVWDKGRDFATVRKVLSMPQVNIVKKTEVQTGG
FSKESILPKRNSDKLIARKKDWDPKKYGGFVSPTVAYSVLVVAKVEKGKSKKLKSVKELLGI
TIMERSSFEKNPIDFLEAKGYKEVKKDLIIKLPKYSLFELENGRKRMLASARELQKGNELAL
PSKYVNFLYLASHYEKLKGSPEDNEQKQLFVEQHKHYLDEIIEQISEFSKRVILADANLDKV
LSAYNKHRDKPIREQAENIIHLFTLTNLGAPAAFKYFDTTIDRKQYRSTKEVLDATLIHQSI
TGLYETRIDLSQLGGDEGADKRTADGSEFESPKKKRKV
05. monoABE8.1_bpNLS + V82S
MSEVEFSHEYWMRHALTLAKRARDEREVPVGAVLVLNNRVIGEGWNRAIGLHDPTAHAEIMA
LRQGGLVMQNYRLIDATLYSTFEPCVMCAGAMIHSRIGRVVFGVRNAKTGAAGSLMDVLHYP
GMNHRVEITEGILADECAALLCYFFRMPRQVFNAQKKAQSSTDSGGSSGGSSGSETPGTSES
ATPESSGGSSGGSDKKYSIGLAIGTNSVGWAVITDEYKVPSKKFKVLGNTDRHSIKKNLIGA
LLFDSGETAEATRLKRTARRRYTRRKNRICYLQEIFSNEMAKVDDSFFHRLEESFLVEEDKK
HERHPIFGNIVDEVAYHEKYPTIYHLRKKLVDSTDKADLRLIYLALAHMIKFRGHFLIEGDL
NPDNSDVDKLFIQLVQTYNQLFEENPINASGVDAKAILSARLSKSRRLENLIAQLPGEKKNG
LFGNLIALSLGLTPNFKSNFDLAEDAKLQLSKDTYDDDLDNLLAQIGDQYADLFLAAKNLSD
AILLSDILRVNTEITKAPLSASMIKRYDEHHQDLTLLKALVRQQLPEKYKEIFFDQSKNGYA
GYIDGGASQEEFYKFIKPILEKMDGTEELLVKLNREDLLRKQRTFDNGSIPHQIHLGELHAI
LRRQEDFYPFLKDNREKIEKILTFRIPYYVGPLARGNSRFAWMTRKSEETITPWNFEEVVDK
GASAQSFIERMTNFDKNLPNEKVLPKHSLLYEYFTVYNELTKVKYVTEGMRKPAFLSGEQKK
AIVDLLFKTNRKVTVKQLKEDYFKKIECFDSVEISGVEDRFNASLGTYHDLLKIIKDKDFLD
NEENEDILEDIVLTLTLFEDREMIEERLKTYAHLFDDKVMKQLKRRRYTGWGRLSRKLINGI
RDKQSGKTILDELKSDGFANRNEMQLIHDDSLTFKEDIQKAQVSGQGDSLHEHIANLAGSPA
IKKGILQTVKVVDELVKVMGRHKPENIVIEMARENQTTQKGQKNSRERMKRIEEGIKELGSQ
ILKEHPVENTQLQNEKLYLYYLQNGRDMYVDQELDINRLSDYDVDHIVPQSFLKDDSIDNKV
LTRSDKNRGKSDNVPSEEVVKKMKNYWRQLLNAKLITQRKFDNLTKAERGGLSELDKAGFIK
RQLVETRQITKHVAQILDSRMNTKYDENDKLIREVKVITLKSKLVSDFRKDFQFYKVREINN
YHHAHDAYLNAVVGTALIKKYPKLESEFVYGDYKVYDVRKMIAKSEQEIGKATAKYFFYSNI
MNFFKTEITLANGEIRKRPLIETNGETGEIVWDKGRDFATVRKVLSMPQVNIVKKTEVQTGG
FSKESILPKRNSDKLIARKKDWDPKKYGGFVSPTVAYSVLVVAKVEKGKSKKLKSVKELLGI
TIMERSSFEKNPIDFLEAKGYKEVKKDLIIKLPKYSLFELENGRKRMLASARELQKGNELAL
PSKYVNFLYLASHYEKLKGSPEDNEQKQLFVEQHKHYLDEIIEQISEFSKRVILADANLDKV
LSAYNKHRDKPIREQAENIIHLFTLTNLGAPAAFKYFDTTIDRKQYRSTKEVLDATLIHQSI
TGLYETRIDLSQLGGDEGADKRTADGSEFESPKKKRKV
06. monoABE8.1_bpNLS + T166R
MSEVEFSHEYWMRHALTLAKRARDEREVPVGAVLVLNNRVIGEGWNRAIGLHDPTAHAEIMA
LRQGGLVMQNYRLIDATLYVTFEPCVMCAGAMIHSRIGRVVFGVRNAKTGAAGSLMDVLHYP
GMNHRVEITEGILADECAALLCYFFRMPRQVFNAQKKAQSSRDSGGSSGGSSGSETPGTSES
ATPESSGGSSGGSDKKYSIGLAIGTNSVGWAVITDEYKVPSKKFKVLGNTDRHSIKKNLIGA
LLFDSGETAEATRLKRTARRRYTRRKNRICYLQEIFSNEMAKVDDSFFHRLEESFLVEEDKK
HERHPIFGNIVDEVAYHEKYPTIYHLRKKLVDSTDKADLRLIYLALAHMIKFRGHFLIEGDL
NPDNSDVDKLFIQLVQTYNQLFEENPINASGVDAKAILSARLSKSRRLENLIAQLPGEKKNG
LFGNLIALSLGLTPNFKSNFDLAEDAKLQLSKDTYDDDLDNLLAQIGDQYADLFLAAKNLSD
AILLSDILRVNTEITKAPLSASMIKRYDEHHQDLTLLKALVRQQLPEKYKEIFFDQSKNGYA
GYIDGGASQEEFYKFIKPILEKMDGTEELLVKLNREDLLRKQRTFDNGSIPHQIHLGELHAI
LRRQEDFYPFLKDNREKIEKILTFRIPYYVGPLARGNSRFAWMTRKSEETITPWNFEEVVDK
GASAQSFIERMTNFDKNLPNEKVLPKHSLLYEYFTVYNELTKVKYVTEGMRKPAFLSGEQKK
AIVDLLFKTNRKVTVKQLKEDYFKKIECFDSVEISGVEDRFNASLGTYHDLLKIIKDKDFLD
NEENEDILEDIVLTLTLFEDREMIEERLKTYAHLFDDKVMKQLKRRRYTGWGRLSRKLINGI
RDKQSGKTILDFLKSDGFANRNFMQLIHDDSLTFKEDIQKAQVSGQGDSLHEHIANLAGSPA
IKKGILQTVKVVDELVKVMGRHKPENIVIEMARENQTTQKGQKNSRERMKRIEEGIKELGSQ
ILKEHPVENTQLQNEKLYLYYLQNGRDMYVDQELDINRLSDYDVDHIVPQSFLKDDSIDNKV
LTRSDKNRGKSDNVPSEEVVKKMKNYWRQLLNAKLITQRKFDNLTKAERGGLSELDKAGFIK
RQLVETRQITKHVAQILDSRMNTKYDENDKLIREVKVITLKSKLVSDFRKDFQFYKVREINN
YHHAHDAYLNAVVGTALIKKYPKLESEFVYGDYKVYDVRKMIAKSEQEIGKATAKYFFYSNI
MNFFKTEITLANGEIRKRPLIETNGETGEIVWDKGRDFATVRKVLSMPQVNIVKKTEVQTGG
FSKESILPKRNSDKLIARKKDWDPKKYGGFVSPTVAYSVLVVAKVEKGKSKKLKSVKELLGI
TIMERSSFEKNPIDFLEAKGYKEVKKDLIIKLPKYSLFELENGRKRMLASARELQKGNELAL
PSKYVNFLYLASHYEKLKGSPEDNEQKQLFVEQHKHYLDEIIEQISEFSKRVILADANLDKV
LSAYNKHRDKPIREQAENIIHLFTLTNLGAPAAFKYFDTTIDRKQYRSTKEVLDATLIHQSI
TGLYETRIDLSQLGGDEGADKRTADGSEFESPKKKRKV
07. monoABE8.1_bpNLS + Q154R
MSEVEFSHEYWMRHALTLAKRARDEREVPVGAVLVLNNRVIGEGWNRAIGLHDPTAHAEIMA
LRQGGLVMQNYRLIDATLYVTFEPCVMCAGAMIHSRIGRVVFGVRNAKTGAAGSLMDVLHYP
GMNHRVEITEGILADECAALLCYFFRMPRRVFNAQKKAQSSTDSGGSSGGSSGSETPGTSES
ATPESSGGSSGGSDKKYSIGLAIGTNSVGWAVITDEYKVPSKKFKVLGNTDRHSIKKNLIGA
LLFDSGETAEATRLKRTARRRYTRRKNRICYLQEIFSNEMAKVDDSFFHRLEESFLVEEDKK
HERHPIFGNIVDEVAYHEKYPTIYHLRKKLVDSTDKADLRLIYLALAHMIKFRGHFLIEGDL
NPDNSDVDKLFIQLVQTYNQLFEENPINASGVDAKAILSARLSKSRRLENLIAQLPGEKKNG
LFGNLIALSLGLTPNFKSNFDLAEDAKLQLSKDTYDDDLDNLLAQIGDQYADLFLAAKNLSD
AILLSDILRVNTEITKAPLSASMIKRYDEHHQDLTLLKALVRQQLPEKYKEIFFDQSKNGYA
GYIDGGASQEEFYKFIKPILEKMDGTEELLVKLNREDLLRKQRTFDNGSIPHQIHLGELHAI
LRRQEDFYPFLKDNREKIEKILTFRIPYYVGPLARGNSRFAWMTRKSEETITPWNFEEVVDK
GASAQSFIERMTNFDKNLPNEKVLPKHSLLYEYFTVYNELTKVKYVTEGMRKPAFLSGEQKK
AIVDLLFKTNRKVTVKQLKEDYFKKIECFDSVEISGVEDRFNASLGTYHDLLKIIKDKDFLD
NEENEDILEDIVLTLTLFEDREMIEERLKTYAHLFDDKVMKQLKRRRYTGWGRLSRKLINGI
RDKQSGKTILDFLKSDGFANRNFMQLIHDDSLTFKEDIQKAQVSGQGDSLHEHIANLAGSPA
IKKGILQTVKVVDELVKVMGRHKPENIVIEMARENQTTQKGQKNSRERMKRIEEGIKELGSQ
ILKEHPVENTQLQNEKLYLYYLQNGRDMYVDQELDINRLSDYDVDHIVPQSFLKDDSIDNKV
LTRSDKNRGKSDNVPSEEVVKKMKNYWRQLLNAKLITQRKFDNLTKAERGGLSELDKAGFIK
RQLVETRQITKHVAQILDSRMNTKYDENDKLIREVKVITLKSKLVSDFRKDFQFYKVREINN
YHHAHDAYLNAVVGTALIKKYPKLESEFVYGDYKVYDVRKMIAKSEQEIGKATAKYFFYSNI
MNFFKTEITLANGEIRKRPLIETNGETGEIVWDKGRDFATVRKVLSMPQVNIVKKTEVQTGG
FSKESILPKRNSDKLIARKKDWDPKKYGGFVSPTVAYSVLVVAKVEKGKSKKLKSVKELLGI
TIMERSSFEKNPIDFLEAKGYKEVKKDLIIKLPKYSLFELENGRKRMLASARELQKGNELAL
PSKYVNFLYLASHYEKLKGSPEDNEQKQLFVEQHKHYLDEIIEQISEFSKRVILADANLDKV
LSAYNKHRDKPIREQAENIIHLFTLTNLGAPAAFKYFDTTIDRKQYRSTKEVLDATLIHQSI
TGLYETRIDLSQLGGDEGADKRTADGSEFESPKKKRKV
08. monoABE8.1_bpNLS + Y147R_Q154R_Y123H
MSEVEFSHEYWMRHALTLAKRARDEREVPVGAVLVLNNRVIGEGWNRAIGLHDPTAHAEIMA
LRQGGLVMQNYRLIDATLYVTFEPCVMCAGAMIHSRIGRVVFGVRNAKTGAAGSLMDVLHHP
GMNHRVEITEGILADECAALLCRFFRMPRRVFNAQKKAQSSTDSGGSSGGSSGSETPGTSES
ATPESSGGSSGGSDKKYSIGLAIGTNSVGWAVITDEYKVPSKKFKVLGNTDRHSIKKNLIGA
LLFDSGETAEATRLKRTARRRYTRRKNRICYLQEIFSNEMAKVDDSFFHRLEESFLVEEDKK
HERHPIFGNIVDEVAYHEKYPTIYHLRKKLVDSTDKADLRLIYLALAHMIKFRGHFLIEGDL
NPDNSDVDKLFIQLVQTYNQLFEENPINASGVDAKAILSARLSKSRRLENLIAQLPGEKKNG
LFGNLIALSLGLTPNFKSNFDLAEDAKLQLSKDTYDDDLDNLLAQIGDQYADLFLAAKNLSD
AILLSDILRVNTEITKAPLSASMIKRYDEHHQDLTLLKALVRQQLPEKYKEIFFDQSKNGYA
GYIDGGASQEEFYKFIKPILEKMDGTEELLVKLNREDLLRKQRTFDNGSIPHQIHLGELHAI
LRRQEDFYPFLKDNREKIEKILTFRIPYYVGPLARGNSRFAWMTRKSEETITPWNFEEVVDK
GASAQSFIERMTNFDKNLPNEKVLPKHSLLYEYFTVYNELTKVKYVTEGMRKPAFLSGEQKK
AIVDLLFKTNRKVTVKQLKEDYFKKIECFDSVEISGVEDRFNASLGTYHDLLKIIKDKDFLD
NEENEDILEDIVLTLTLFEDREMIEERLKTYAHLFDDKVMKQLKRRRYTGWGRLSRKLINGI
RDKQSGKTILDFLKSDGFANRNFMQLIHDDSLTFKEDIQKAQVSGQGDSLHEHIANLAGSPA
IKKGILQTVKVVDELVKVMGRHKPENIVIEMARENQTTQKGQKNSRERMKRIEEGIKELGSQ
ILKEHPVENTQLQNEKLYLYYLQNGRDMYVDQELDINRLSDYDVDHIVPQSFLKDDSIDNKV
LTRSDKNRGKSDNVPSEEVVKKMKNYWRQLLNAKLITQRKFDNLTKAERGGLSELDKAGFIK
RQLVETRQITKHVAQILDSRMNTKYDENDKLIREVKVITLKSKLVSDFRKDFQFYKVREINN
YHHAHDAYLNAVVGTALIKKYPKLESEFVYGDYKVYDVRKMIAKSEQEIGKATAKYFFYSNI
MNFFKTEITLANGEIRKRPLIETNGETGEIVWDKGRDFATVRKVLSMPQVNIVKKTEVQTGG
FSKESILPKRNSDKLIARKKDWDPKKYGGFVSPTVAYSVLVVAKVEKGKSKKLKSVKELLGI
TIMERSSFEKNPIDFLEAKGYKEVKKDLIIKLPKYSLFELENGRKRMLASARELQKGNELAL
PSKYVNFLYLASHYEKLKGSPEDNEQKQLFVEQHKHYLDEIIEQISEFSKRVILADANLDKV
LSAYNKHRDKPIREQAENIIHLFTLTNLGAPAAFKYFDTTIDRKQYRSTKEVLDATLIHQSI
TGLYETRIDLSQLGGDEGADKRTADGSEFESPKKKRKV
09. monoABE8.1_bpNLS + Y147R_Q154R_I76Y
MSEVEFSHEYWMRHALTLAKRARDEREVPVGAVLVLNNRVIGEGWNRAIGLHDPTAHAEIMA
LRQGGLVMQNYRLYDATLYVTFEPCVMCAGAMIHSRIGRVVFGVRNAKTGAAGSLMDVLHYP
GMNHRVEITEGILADECAALLCRFFRMPRRVFNAQKKAQSSTDSGGSSGGSSGSETPGTSES
ATPESSGGSSGGSDKKYSIGLAIGTNSVGWAVITDEYKVPSKKFKVLGNTDRHSIKKNLIGA
LLFDSGETAEATRLKRTARRRYTRRKNRICYLQEIFSNEMAKVDDSEFHRLEESFLVEEDKK
HERHPIFGNIVDEVAYHEKYPTIYHLRKKLVDSTDKADLRLIYLALAHMIKFRGHFLIEGDL
NPDNSDVDKLFIQLVQTYNQLFEENPINASGVDAKAILSARLSKSRRLENLIAQLPGEKKNG
LFGNLIALSLGLTPNFKSNFDLAEDAKLQLSKDTYDDDLDNLLAQIGDQYADLFLAAKNLSD
AILLSDILRVNTEITKAPLSASMIKRYDEHHQDLTLLKALVRQQLPEKYKEIFFDQSKNGYA
GYIDGGASQEEFYKFIKPILEKMDGTEELLVKLNREDLLRKQRTFDNGSIPHQIHLGELHAI
LRRQEDFYPFLKDNREKIEKILTFRIPYYVGPLARGNSRFAWMTRKSEETITPWNFEEVVDK
GASAQSFIERMTNFDKNLPNEKVLPKHSLLYEYFTVYNELTKVKYVTEGMRKPAFLSGEQKK
AIVDLLFKTNRKVTVKQLKEDYFKKIECFDSVEISGVEDRFNASLGTYHDLLKIIKDKDFLD
NEENEDILEDIVLTLTLFEDREMIEERLKTYAHLFDDKVMKQLKRRRYTGWGRLSRKLINGI
RDKQSGKTILDFLKSDGFANRNFMQLIHDDSLTFKEDIQKAQVSGQGDSLHEHIANLAGSPA
IKKGILQTVKVVDELVKVMGRHKPENIVIEMARENQTTQKGQKNSRERMKRIEEGIKELGSQ
ILKEHPVENTQLQNEKLYLYYLQNGRDMYVDQELDINRLSDYDVDHIVPQSFLKDDSIDNKV
LTRSDKNRGKSDNVPSEEVVKKMKNYWRQLLNAKLITQRKFDNLTKAERGGLSELDKAGFIK
RQLVETRQITKHVAQILDSRMNTKYDENDKLIREVKVITLKSKLVSDFRKDFQFYKVREINN
YHHAHDAYLNAVVGTALIKKYPKLESEFVYGDYKVYDVRKMIAKSEQEIGKATAKYFFYSNI
MNFFKTEITLANGEIRKRPLIETNGETGEIVWDKGRDFATVRKVLSMPQVNIVKKTEVQTGG
FSKESILPKRNSDKLIARKKDWDPKKYGGFVSPTVAYSVLVVAKVEKGKSKKLKSVKELLGI
TIMERSSFEKNPIDFLEAKGYKEVKKDLIIKLPKYSLFELENGRKRMLASARELQKGNELAL
PSKYVNFLYLASHYEKLKGSPEDNEQKQLFVEQHKHYLDEIIEQISEFSKRVILADANLDKV
LSAYNKHRDKPIREQAENIIHLFTLTNLGAPAAFKYFDTTIDRKQYRSTKEVLDATLIHQSI
TGLYETRIDLSQLGGDEGADKRTADGSEFESPKKKRKV
10. monoABE8.1_bpNLS + Y147R_Q154R_T166R
MSEVEFSHEYWMRHALTLAKRARDEREVPVGAVLVLNNRVIGEGWNRAIGLHDPTAHAEIMA
LRQGGLVMQNYRLIDATLYVTFEPCVMCAGAMIHSRIGRVVFGVRNAKTGAAGSLMDVLHYP
GMNHRVEITEGILADECAALLCRFFRMPRRVFNAQKKAQSSRDSGGSSGGSSGSETPGTSES
ATPESSGGSSGGSDKKYSIGLAIGTNSVGWAVITDEYKVPSKKFKVLGNTDRHSIKKNLIGA
LLFDSGETAEATRLKRTARRRYTRRKNRICYLQEIFSNEMAKVDDSFFHRLEESFLVEEDKK
HERHPIFGNIVDEVAYHEKYPTIYHLRKKLVDSTDKADLRLIYLALAHMIKFRGHFLIEGDL
NPDNSDVDKLFIQLVQTYNQLFEENPINASGVDAKAILSARLSKSRRLENLIAQLPGEKKNG
LFGNLIALSLGLTPNFKSNFDLAEDAKLQLSKDTYDDDLDNLLAQIGDQYADLFLAAKNLSD
AILLSDILRVNTEITKAPLSASMIKRYDEHHQDLTLLKALVRQQLPEKYKEIFFDQSKNGYA
GYIDGGASQEEFYKFIKPILEKMDGTEELLVKLNREDLLRKQRTFDNGSIPHQIHLGELHAI
LRRQEDFYPFLKDNREKIEKILTFRIPYYVGPLARGNSRFAWMTRKSEETITPWNFEEVVDK
GASAQSFIERMTNFDKNLPNEKVLPKHSLLYEYFTVYNELTKVKYVTEGMRKPAFLSGEQKK
AIVDLLFKTNRKVTVKQLKEDYFKKIECFDSVEISGVEDRFNASLGTYHDLLKIIKDKDFLD
NEENEDILEDIVLTLTLFEDREMIEERLKTYAHLFDDKVMKQLKRRRYTGWGRLSRKLINGI
RDKQSGKTILDFLKSDGFANRNFMQLIHDDSLTFKEDIQKAQVSGQGDSLHEHIANLAGSPA
IKKGILQTVKVVDELVKVMGRHKPENIVIEMARENQTTQKGQKNSRERMKRIEEGIKELGSQ
ILKEHPVENTQLQNEKLYLYYLQNGRDMYVDQELDINRLSDYDVDHIVPQSFLKDDSIDNKV
LTRSDKNRGKSDNVPSEEVVKKMKNYWRQLLNAKLITQRKFDNLTKAERGGLSELDKAGFIK
RQLVETRQITKHVAQILDSRMNTKYDENDKLIREVKVITLKSKLVSDFRKDFQFYKVREINN
YHHAHDAYLNAVVGTALIKKYPKLESEFVYGDYKVYDVRKMIAKSEQEIGKATAKYFFYSNI
MNFFKTEITLANGEIRKRPLIETNGETGEIVWDKGRDFATVRKVLSMPQVNIVKKTEVQTGG
FSKESILPKRNSDKLIARKKDWDPKKYGGFVSPTVAYSVLVVAKVEKGKSKKLKSVKELLGI
TIMERSSFEKNPIDFLEAKGYKEVKKDLIIKLPKYSLFELENGRKRMLASARELQKGNELAL
PSKYVNFLYLASHYEKLKGSPEDNEQKQLFVEQHKHYLDEIIEQISEFSKRVILADANLDKV
LSAYNKHRDKPIREQAENIIHLFTLTNLGAPAAFKYFDTTIDRKQYRSTKEVLDATLIHQSI
TGLYETRIDLSQLGGDEGADKRTADGSEFESPKKKRKV
11. monoABE8.1_bpNLS + Y147T_Q154R
MSEVEFSHEYWMRHALTLAKRARDEREVPVGAVLVLNNRVIGEGWNRAIGLHDPTAHAEIMA
LRQGGLVMQNYRLIDATLYVTFEPCVMCAGAMIHSRIGRVVFGVRNAKTGAAGSLMDVLHYP
GMNHRVEITEGILADECAALLCTFFRMPRRVFNAQKKAQSSTDSGGSSGGSSGSETPGTSES
ATPESSGGSSGGSDKKYSIGLAIGTNSVGWAVITDEYKVPSKKFKVLGNTDRHSIKKNLIGA
LLFDSGETAEATRLKRTARRRYTRRKNRICYLQEIFSNEMAKVDDSFFHRLEESFLVEEDKK
HERHPIFGNIVDEVAYHEKYPTIYHLRKKLVDSTDKADLRLIYLALAHMIKFRGHFLIEGDL
NPDNSDVDKLFIQLVQTYNQLFEENPINASGVDAKAILSARLSKSRRLENLIAQLPGEKKNG
LFGNLIALSLGLTPNFKSNFDLAEDAKLQLSKDTYDDDLDNLLAQIGDQYADLFLAAKNLSD
AILLSDILRVNTEITKAPLSASMIKRYDEHHQDLTLLKALVRQQLPEKYKEIFFDQSKNGYA
GYIDGGASQEEFYKFIKPILEKMDGTEELLVKLNREDLLRKQRTFDNGSIPHQIHLGELHAI
LRRQEDFYPFLKDNREKIEKILTFRIPYYVGPLARGNSRFAWMTRKSEETITPWNFEEVVDK
GASAQSFIERMTNFDKNLPNEKVLPKHSLLYEYFTVYNELTKVKYVTEGMRKPAFLSGEQKK
AIVDLLFKTNRKVTVKQLKEDYFKKIECFDSVEISGVEDRFNASLGTYHDLLKIIKDKDFLD
NEENEDILEDIVLTLTLFEDREMIEERLKTYAHLFDDKVMKQLKRRRYTGWGRLSRKLINGI
RDKQSGKTILDFLKSDGFANRNFMQLIHDDSLTFKEDIQKAQVSGQGDSLHEHIANLAGSPA
IKKGILQTVKVVDELVKVMGRHKPENIVIEMARENQTTQKGQKNSRERMKRIEEGIKELGSQ
ILKEHPVENTQLQNEKLYLYYLQNGRDMYVDQELDINRLSDYDVDHIVPQSELKDDSIDNKV
LTRSDKNRGKSDNVPSEEVVKKMKNYWRQLLNAKLITQRKFDNLTKAERGGLSELDKAGFIK
RQLVETRQITKHVAQILDSRMNTKYDENDKLIREVKVITLKSKLVSDFRKDFQFYKVREINN
YHHAHDAYLNAVVGTALIKKYPKLESEFVYGDYKVYDVRKMIAKSEQEIGKATAKYFFYSNI
MNFFKTEITLANGEIRKRPLIETNGETGEIVWDKGRDFATVRKVLSMPQVNIVKKTEVQTGG
FSKESILPKRNSDKLIARKKDWDPKKYGGFVSPTVAYSVLVVAKVEKGKSKKLKSVKELLGI
TIMERSSFEKNPIDFLEAKGYKEVKKDLIIKLPKYSLFELENGRKRMLASARELQKGNELAL
PSKYVNFLYLASHYEKLKGSPEDNEQKQLFVEQHKHYLDEIIEQISEFSKRVILADANLDKV
LSAYNKHRDKPIREQAENIIHLFTLTNLGAPAAFKYFDTTIDRKQYRSTKEVLDATLIHQSI
TGLYETRIDLSQLGGDEGADKRTADGSEFESPKKKRKV
12. monoABE8.1_bpNLS + Y147T_Q154S
MSEVEFSHEYWMRHALTLAKRARDEREVPVGAVLVLNNRVIGEGWNRAIGLHDPTAHAEIMA
LRQGGLVMQNYRLIDATLYVTFEPCVMCAGAMIHSRIGRVVFGVRNAKTGAAGSLMDVLHYP
GMNHRVEITEGILADECAALLCTFFRMPRSVFNAQKKAQSSTDSGGSSGGSSGSETPGTSES
ATPESSGGSSGGSDKKYSIGLAIGTNSVGWAVITDEYKVPSKKFKVLGNTDRHSIKKNLIGA
LLFDSGETAEATRLKRTARRRYTRRKNRICYLQEIFSNEMAKVDDSFFHRLEESFLVEEDKK
HERHPIFGNIVDEVAYHEKYPTIYHLRKKLVDSTDKADLRLIYLALAHMIKFRGHFLIEGDL
NPDNSDVDKLFIQLVQTYNQLFEENPINASGVDAKAILSARLSKSRRLENLIAQLPGEKKNG
LFGNLIALSLGLTPNFKSNFDLAEDAKLQLSKDTYDDDLDNLLAQIGDQYADLFLAAKNLSD
AILLSDILRVNTEITKAPLSASMIKRYDEHHQDLTLLKALVRQQLPEKYKEIFFDQSKNGYA
GYIDGGASQEEFYKFIKPILEKMDGTEELLVKLNREDLLRKQRTFDNGSIPHQIHLGELHAI
LRRQEDFYPFLKDNREKIEKILTFRIPYYVGPLARGNSRFAWMTRKSEETITPWNFEEVVDK
GASAQSFIERMTNFDKNLPNEKVLPKHSLLYEYFTVYNELTKVKYVTEGMRKPAFLSGEQKK
AIVDLLFKTNRKVTVKQLKEDYFKKIECFDSVEISGVEDRFNASLGTYHDLLKIIKDKDFLD
NEENEDILEDIVLTLTLFEDREMIEERLKTYAHLFDDKVMKQLKRRRYTGWGRLSRKLINGI
RDKQSGKTILDFLKSDGFANRNFMQLIHDDSLTFKEDIQKAQVSGQGDSLHEHIANLAGSPA
IKKGILQTVKVVDELVKVMGRHKPENIVIEMARENQTTQKGQKNSRERMKRIEEGIKELGSQ
ILKEHPVENTQLQNEKLYLYYLQNGRDMYVDQELDINRLSDYDVDHIVPQSFLKDDSIDNKV
LTRSDKNRGKSDNVPSEEVVKKMKNYWRQLLNAKLITQRKFDNLTKAERGGLSELDKAGFIK
RQLVETRQITKHVAQILDSRMNTKYDENDKLIREVKVITLKSKLVSDFRKDFQFYKVREINN
YHHAHDAYLNAVVGTALIKKYPKLESEFVYGDYKVYDVRKMIAKSEQEIGKATAKYFFYSNI
MNFFKTEITLANGEIRKRPLIETNGETGEIVWDKGRDFATVRKVLSMPQVNIVKKTEVQTGG
FSKESILPKRNSDKLIARKKDWDPKKYGGFVSPTVAYSVLVVAKVEKGKSKKLKSVKELLGI
TIMERSSFEKNPIDELEAKGYKEVKKDLIIKLPKYSLFELENGRKRMLASARELQKGNELAL
PSKYVNFLYLASHYEKLKGSPEDNEQKQLFVEQHKHYLDEIIEQISEFSKRVILADANLDKV
LSAYNKHRDKPIREQAENIIHLFTLTNLGAPAAFKYFDTTIDRKQYRSTKEVLDATLIHQSI
TGLYETRIDLSQLGGDEGADKRTADGSEFESPKKKRKV
13. monoABE8.1_bpNLS + H123Y123H_Y147R_Q154R_I76Y
MSEVEFSHEYWMRHALTLAKRARDEREVPVGAVLVLNNRVIGEGWNRAIGLHDPTAHAEIMA
LRQGGLVMQNYRLYDATLYVTFEPCVMCAGAMIHSRIGRVVFGVRNAKTGAAGSLMDVLHHP
GMNHRVEITEGILADECAALLCRFFRMPRRVFNAQKKAQSSTDSGGSSGGSSGSETPGTSES
ATPESSGGSSGGSDKKYSIGLAIGTNSVGWAVITDEYKVPSKKFKVLGNTDRHSIKKNLIGA
LLFDSGETAEATRLKRTARRRYTRRKNRICYLQEIFSNEMAKVDDSFFHRLEESFLVEEDKK
HERHPIFGNIVDEVAYHEKYPTIYHLRKKLVDSTDKADLRLIYLALAHMIKFRGHFLIEGDL
NPDNSDVDKLFIQLVQTYNQLFEENPINASGVDAKAILSARLSKSRRLENLIAQLPGEKKNG
LFGNLIALSLGLTPNFKSNFDLAEDAKLQLSKDTYDDDLDNLLAQIGDQYADLFLAAKNLSD
AILLSDILRVNTEITKAPLSASMIKRYDEHHQDLTLLKALVRQQLPEKYKEIFFDQSKNGYA
GYIDGGASQEEFYKFIKPILEKMDGTEELLVKLNREDLLRKQRTFDNGSIPHQIHLGELHAI
LRRQEDFYPFLKDNREKIEKILTFRIPYYVGPLARGNSRFAWMTRKSEETITPWNFEEVVDK
GASAQSFIERMTNFDKNLPNEKVLPKHSLLYEYFTVYNELTKVKYVTEGMRKPAFLSGEQKK
AIVDLLFKTNRKVTVKQLKEDYFKKIECFDSVEISGVEDRFNASLGTYHDLLKIIKDKDFLD
NEENEDILEDIVLTLTLFEDREMIEERLKTYAHLFDDKVMKQLKRRRYTGWGRLSRKLINGI
RDKQSGKTILDFLKSDGFANRNFMQLIHDDSLTFKEDIQKAQVSGQGDSLHEHIANLAGSPA
IKKGILQTVKVVDELVKVMGRHKPENIVIEMARENQTTQKGQKNSRERMKRIEEGIKELGSQ
ILKEHPVENTQLQNEKLYLYYLQNGRDMYVDQELDINRLSDYDVDHIVPQSFLKDDSIDNKV
LTRSDKNRGKSDNVPSEEVVKKMKNYWRQLLNAKLITQRKFDNLTKAERGGLSELDKAGFIK
RQLVETRQITKHVAQILDSRMNTKYDENDKLIREVKVITLKSKLVSDFRKDFQFYKVREINN
YHHAHDAYLNAVVGTALIKKYPKLESEFVYGDYKVYDVRKMIAKSEQEIGKATAKYFFYSNI
MNFFKTEITLANGEIRKRPLIETNGETGEIVWDKGRDFATVRKVLSMPQVNIVKKTEVQTGG
FSKESILPKRNSDKLIARKKDWDPKKYGGFVSPTVAYSVLVVAKVEKGKSKKLKSVKELLGI
TIMERSSFEKNPIDFLEAKGYKEVKKDLIIKLPKYSLFELENGRKRMLASARELQKGNELAL
PSKYVNFLYLASHYEKLKGSPEDNEQKQLFVEQHKHYLDEIIEQISEFSKRVILADANLDKV
LSAYNKHRDKPIREQAENIIHLFTLTNLGAPAAFKYFDTTIDRKQYRSTKEVLDATLIHQSI
TGLYETRIDLSQLGGDEGADKRTADGSEFESPKKKRKV
14. monoABE8.1_bpNLS + V82S + Q154R
MSEVEFSHEYWMRHALTLAKRARDEREVPVGAVLVLNNRVIGEGWNRAIGLHDPTAHAEIMA
LRQGGLVMQNYRLIDATLYSTFEPCVMCAGAMIHSRIGRVVFGVRNAKTGAAGSLMDVLHYP
GMNHRVEITEGILADECAALLCYFFRMPRRVFNAQKKAQSSTDSGGSSGGSSGSETPGTSES
ATPESSGGSSGGSDKKYSIGLAIGTNSVGWAVITDEYKVPSKKFKVLGNTDRHSIKKNLIGA
LLFDSGETAEATRLKRTARRRYTRRKNRICYLQEIFSNEMAKVDDSFFHRLEESFLVEEDKK
HERHPIFGNIVDEVAYHEKYPTIYHLRKKLVDSTDKADLRLIYLALAHMIKFRGHFLIEGDL
NPDNSDVDKLFIQLVQTYNQLFEENPINASGVDAKAILSARLSKSRRLENLIAQLPGEKKNG
LFGNLIALSLGLTPNFKSNFDLAEDAKLQLSKDTYDDDLDNLLAQIGDQYADLFLAAKNLSD
AILLSDILRVNTEITKAPLSASMIKRYDEHHQDLTLLKALVRQQLPEKYKEIFFDQSKNGYA
GYIDGGASQEEFYKFIKPILEKMDGTEELLVKLNREDLLRKQRTFDNGSIPHQIHLGELHAI
LRRQEDFYPFLKDNREKIEKILTFRIPYYVGPLARGNSRFAWMTRKSEETITPWNFEEVVDK
GASAQSFIERMTNFDKNLPNEKVLPKHSLLYEYFTVYNELTKVKYVTEGMRKPAFLSGEQKK
AIVDLLFKTNRKVTVKQLKEDYFKKIECFDSVEISGVEDRFNASLGTYHDLLKIIKDKDFLD
NEENEDILEDIVLTLTLFEDREMIEERLKTYAHLFDDKVMKQLKRRRYTGWGRLSRKLINGI
RDKQSGKTILDFLKSDGFANRNFMQLIHDDSLTFKEDIQKAQVSGQGDSLHEHIANLAGSPA
IKKGILQTVKVVDELVKVMGRHKPENIVIEMARENQTTQKGQKNSRERMKRIEEGIKELGSQ
ILKEHPVENTQLQNEKLYLYYLQNGRDMYVDQELDINRLSDYDVDHIVPQSFLKDDSIDNKV
LTRSDKNRGKSDNVPSEEVVKKMKNYWRQLLNAKLITQRKFDNLTKAERGGLSELDKAGFIK
RQLVETRQITKHVAQILDSRMNTKYDENDKLIREVKVITLKSKLVSDFRKDFQFYKVREINN
YHHAHDAYLNAVVGTALIKKYPKLESEFVYGDYKVYDVRKMIAKSEQEIGKATAKYFFYSNI
MNFFKTEITLANGEIRKRPLIETNGETGEIVWDKGRDFATVRKVLSMPQVNIVKKTEVQTGG
FSKESILPKRNSDKLIARKKDWDPKKYGGFVSPTVAYSVLVVAKVEKGKSKKLKSVKELLGI
TIMERSSFEKNPIDFLEAKGYKEVKKDLIIKLPKYSLFELENGRKRMLASARELQKGNELAL
PSKYVNFLYLASHYEKLKGSPEDNEQKQLFVEQHKHYLDEIIEQISEFSKRVILADANLDKV
LSAYNKHRDKPIREQAENIIHLFTLTNLGAPAAFKYFDTTIDRKQYRSTKEVLDATLIHQSI
TGLYETRIDLSQLGGDEGADKRTADGSEFESPKKKRKV

[0614] In some embodiments, the base editor further comprises a domain comprising all or a portion of a uracil glycosylase inhibitor (UGI). In some embodiments, the base editor comprises a domain comprising all or a portion of a uracil binding protein (UBP), such as a uracil DNA glycosylase (UDG). In some embodiments, the base editor comprises a domain comprising all or a portion of a nucleic acid polymerase. In some embodiments, a nucleic acid polymerase or portion thereof incorporated into a base editor is a translesion DNA polymerase.

[0615] In some embodiments, a domain of the base editor can comprise multiple domains. For example, the base editor comprising a polynucleotide programmable nucleotide binding domain derived from Cas9 can comprise an REC lobe and an NUC lobe corresponding to the REC lobe and NUC lobe of a wild-type or natural Cas9. In another example, the base editor can comprise one or more of a RuvCI domain, BH domain, REC1 domain, REC2 domain, RuvCII domain, L1 domain, HNH domain, L2 domain, RuvCIII domain, WED domain, TOPO domain or CTD domain. In some embodiments, one or more domains of the base editor comprise a mutation (e.g., substitution, insertion, deletion) relative to a wild type version of a polypeptide comprising the domain. For example, an HNH domain of a polynucleotide programmable DNA binding domain can comprise an H840A substitution. In another example, a RuvCI domain of a polynucleotide programmable DNA binding domain can comprise a D10A substitution.

[0616] Different domains (e.g., adjacent domains) of the base editor disclosed herein can be connected to each other with or without the use of one or more linker domains (e.g., an XTEN linker domain). In some embodiments, a linker domain can be a bond (e.g., covalent bond), chemical group, or a molecule linking two molecules or moieties, e.g., two domains of a fusion protein, such as, for example, a first domain (e.g., Cas9-derived domain) and a second domain (e.g., an adenosine deaminase domain or a cytidine deaminase domain). In some embodiments, a linker is a covalent bond (e.g., a carbon-carbon bond, disulfide bond, carbon-hetero atom bond, etc.). In certain embodiments, a linker is a carbon nitrogen bond of an amide linkage. In certain embodiments, a linker is a cyclic or acyclic, substituted or unsubstituted, branched or unbranched aliphatic or heteroaliphatic linker. In certain embodiments, a linker is polymeric (e.g., polyethylene, polyethylene glycol, polyamide, polyester, etc.). In certain embodiments, a linker comprises a monomer, dimer, or polymer of aminoalkanoic acid. In some embodiments, a linker comprises an aminoalkanoic acid (e.g., glycine, ethanoic acid, alanine, beta-alanine, 3-aminopropanoic acid, 4-aminobutanoic acid, 5-pentanoic acid, etc.). In some embodiments, a linker comprises a monomer, dimer, or polymer of aminohexanoic acid (Ahx). In certain embodiments, a linker is based on a carbocyclic moiety (e.g., cyclopentane, cyclohexane). In other embodiments, a linker comprises a polyethylene glycol moiety (PEG). In certain embodiments, a linker comprises an aryl or heteroaryl moiety. In certain embodiments, the linker is based on a phenyl ring. A linker can include functionalized moieties to facilitate attachment of a nucleophile (e.g., thiol, amino) from the peptide to the linker. Any electrophile can be used as part of the linker. Exemplary electrophiles include, but are not limited to, activated esters, activated amides, Michael acceptors, alkyl halides, aryl halides, acyl halides, and isothiocyanates. In some embodiments, a linker joins a gRNA binding domain of an RNA-programmable nuclease, including a Cas9 nuclease domain, and the catalytic domain of a nucleic acid editing protein. In some embodiments, a linker joins a dCas9 and a second domain (e.g., UGI, cytidine deaminase, etc.).

[0617] Typically, a linker is positioned between, or flanked by, two groups, molecules, or other moieties and connected to each one via a covalent bond, thus connecting the two. In some embodiments, a linker is an amino acid or a plurality of amino acids (e.g., a peptide or protein). In some embodiments, a linker is an organic molecule, group, polymer, or chemical moiety. In some embodiments, a linker is 2-100 amino acids in length, for example, 2, 3, 4, 5, 6, 7, 8, 9, 10, 11, 12, 13, 14, 15, 16, 17, 18, 19, 20, 21, 22, 23, 24, 25, 26, 27, 28, 29, 30, 30-35, 35-40, 40-45, 45-50, 50-60, 60-70, 70-80, 80-90, 90-100, 100-150, or 150-200 amino acids in length. In some embodiments, the linker is about 3 to about 104 (e.g., 5, 6, 7, 8, 9, 10, 11, 12, 13, 14, 15, 16, 17, 18, 19, 20, 21, 22, 23, 24, 25, 26, 27, 28, 29, 30, 31, 32, 33, 34, 35, 36, 37, 38, 39, 40, 41, 42, 43, 44, 45, 46, 47, 48, 49, 50, 55, 60, 65, 70, 75, 80, 85, 90, 95, or 100) amino acids in length. Longer or shorter linkers are also contemplated. In some embodiments, a linker domain comprises the amino acid sequence SGSETPGTSESATPES, which can also be referred to as the XTEN linker. Any method for linking the fusion protein domains can be employed (e.g., ranging from very flexible linkers of the form (SGGS)n, (GGGS)n, (GGGGS)n, and (G)n, to more rigid linkers of the form (EAAAK)n, (GGS)n, SGSETPGTSESATPES (see, e.g., Guilinger J P, Thompson D B, Liu D R. Fusion of catalytically inactive Cas9 to FokI nuclease improves the specificity of genome modification. Nat. Biotechnol. 2014; 32(6): 577-82; the entire contents are incorporated herein by reference), or (XP)n motif, in order to achieve the optimal length for activity for the nucleobase editor. In some embodiments, n is 1, 2, 3, 4, 5, 6, 7, 8, 9, 10, 11, 12, 13, 14, or 15. In some embodiments, the linker comprises a (GGS)n motif, wherein n is 1, 3, or 7. In some embodiments, the Cas9 domain of the fusion proteins provided herein are fused via a linker comprising the amino acid sequence SGSETPGTSESATPES. In some embodiments, a linker comprises a plurality of proline residues and is 5-21, 5-14, 5-9, 5-7 amino acids in length, e.g., PAPAP, PAPAPA, PAPAPAP, PAPAPAPA, P(AP)4, P(AP)7, P(AP)10 (see, e.g., Tan J, Zhang F, Karcher D, Bock R. Engineering of high-precision base editors for site-specific single nucleotide replacement. Nat Commun. 2019 Jan. 25; 10(1):439; the entire contents are incorporated herein by reference). Such proline-rich linkers are also termed “rigid” linkers.

### Linkers

[0618] In certain embodiments, linkers may be used to link any of the peptides or peptide domains of the invention. The linker may be as simple as a covalent bond, or it may be a polymeric linker many atoms in length. In certain embodiments, the linker is a polypeptide or based on amino acids. In other embodiments, the linker is not peptide-like. In certain embodiments, the linker is a covalent bond (e.g., a carbon-carbon bond, disulfide bond, carbon-heteroatom bond, etc.). In certain embodiments, the linker is a carbon-nitrogen bond of an amide linkage. In certain embodiments, the linker is a cyclic or acyclic, substituted or unsubstituted, branched or unbranched aliphatic or heteroaliphatic linker. In certain embodiments, the linker is polymeric (e.g., polyethylene, polyethylene glycol, polyamide, polyester, etc.). In certain embodiments, the linker comprises a monomer, dimer, or polymer of aminoalkanoic acid. In certain embodiments, the linker comprises an aminoalkanoic acid (e.g., glycine, ethanoic acid, alanine, beta-alanine, 3-aminopropanoic acid, 4-aminobutanoic acid, 5-pentanoic acid, etc.). In certain embodiments, the linker comprises a monomer, dimer, or polymer of aminohexanoic acid (Ahx). In certain embodiments, the linker is based on a carbocyclic moiety (e.g., cyclopentane, cyclohexane). In other embodiments, the linker comprises a polyethylene glycol moiety (PEG). In other embodiments, the linker comprises amino acids. In certain embodiments, the linker comprises a peptide. In certain embodiments, the linker comprises an aryl or heteroaryl moiety. In certain embodiments, the linker is based on a phenyl ring. The linker may include functionalized moieties to facilitate attachment of a nucleophile (e.g., thiol, amino) from the peptide to the linker. Any electrophile may be used as part of the linker. Exemplary electrophiles include, but are not limited to, activated esters, activated amides, Michael acceptors, alkyl halides, aryl halides, acyl halides, and isothiocyanates.

[0619] In some embodiments, the linker is an amino acid or a plurality of amino acids (e.g., a peptide or protein). In some embodiments, the linker is a bond (e.g., a covalent bond), an organic molecule, group, polymer, or chemical moiety. In some embodiments, the linker is about 3 to about 104 (e.g., 5, 6, 7, 8, 9, 10, 11, 12, 13, 14, 15, 16, 17, 18, 19, 20, 21, 22, 23, 24, 25, 26, 27, 28, 29, 30, 31, 32, 33, 34, 35, 36, 37, 38, 39, 40, 41, 42, 43, 44, 45, 46, 47, 48, 49, 50, 55, 60, 65, 70, 75, 80, 85, 90, 95, or 100) amino acids in length.

[0620] In some embodiments, the cytidine deaminase and adenosine deaminase and the napDNAbp are fused via a linker that is 4, 16, 32, or 104 amino acids in length. In some embodiments, the linker is about 3 to about 104 amino acids in length. In some embodiments, any of the fusion proteins provided herein, comprise a cytidine deaminase, adenosine deaminase and a Cas9 domain that are fused to each other via a linker. Various linker lengths and flexibilities between the deaminase domain (e.g., an engineered ecTadA) and the Cas9 domain can be employed (e.g., ranging from very flexible linkers of the form (GGGS)ₙ, (GGGGS)ₙ, and (G)ₙ to more rigid linkers of the form (EAAAK)ₙ, (SGGS)ₙ, SGSETPGTSESATPES (see, e.g., Guilinger J P, Thompson D B, Liu D R. Fusion of catalytically inactive Cas9 to FokI nuclease improves the specificity of genome modification. Nat. Biotechnol. 2014; 32(6): 577-82; the entire contents are incorporated herein by reference) and (XP)ₙ) in order to achieve the optimal length for activity for the nucleobase editor. In some embodiments, n is 1, 2, 3, 4, 5, 6, 7, 8, 9, 10, 11, 12, 13, 14, or 15. In some embodiments, the linker comprises a (GGS)ₙ, motif, wherein n is 1, 3, or 7. In some embodiments, the cytidine deaminase and adenosine deaminase and the Cas9 domain of any of the fusion proteins provided herein are fused via a linker (e.g., an XTEN linker) comprising the amino acid sequence SGSETPGTSESATPES.

[0621] In some embodiments, the target region comprises a target window, wherein the target window comprises the target nucleobase pair. In some embodiments, the target window comprises 1-10 nucleotides. In some embodiments, the target window is 1, 2, 3, 4, 5, 6, 7, 8, 9, 10, 11, 12, 13, 14, 15, 16, 17, 18, 19, or 20 nucleotides in length. In some embodiments, the intended edit of base pair is within the target window. In some embodiments, the target window comprises the intended edit of base pair. In some embodiments, the method is performed using any of the base editors provided herein. In some embodiments, a target window is a deamination window.

[0622] Additionally, in some cases, a Gam protein can be fused to an N terminus of a base editor. In some cases, a Gam protein can be fused to a C-terminus of a base editor. The Gam protein of bacteriophage Mu can bind to the ends of double strand breaks (DSBs) and protect them from degradation. In some embodiments, using Gam to bind the free ends of DSB can reduce indel formation during the process of base editing. In some embodiments, 174-residue Gam protein is fused to the N terminus of the base editors. See. Komor, A. C., et al., “Improved base excision repair inhibition and bacteriophage Mu Gam protein yields C:G-to-T:A base editors with higher efficiency and product purity” Science Advances 3:eaao4774 (2017). In some cases, a mutation or mutations can change the length of a base editor domain relative to a wild type domain. For example, a deletion of at least one amino acid in at least one domain can reduce the length of the base editor. In another case, a mutation or mutations do not change the length of a domain relative to a wild type domain. For example, substitution(s) in any domain does/do not change the length of the base editor.

[0623] In some embodiments, the base editing fusion proteins provided herein need to be positioned at a precise location, for example, where a target base is placed within a defined region (e.g., a “deamination window”). In some cases, a target can be within a 4 base region. In some cases, such a defined target region can be approximately 15 bases upstream of the PAM. See Komor, A. C., et al., “Programmable editing of a target base in genomic DNA without double-stranded DNA cleavage” Nature 533, 420-424 (2016); Gaudelli, N. M., et al., “Programmable base editing of A•T to G•C in genomic DNA without DNA cleavage” Nature 551, 464-471 (2017); and Komor, A. C., et al., “Improved base excision repair inhibition and bacteriophage Mu Gam protein yields C:G-to-T:A base editors with higher efficiency and product purity” Science Advances 3:eaao4774 (2017), the entire contents of which are hereby incorporated by reference.

[0624] A defined target region can be a deamination window. A deamination window can be the defined region in which a base editor acts upon and deaminates a target nucleotide. In some embodiments, the deamination window is within a 2, 3, 4, 5, 6, 7, 8, 9, or 10 base regions. In some embodiments, the deamination window is 5, 6, 7, 8, 9, 10, 11, 12, 13, 14, 15, 16, 17, 18, 19, 20, 21, 22, 23, 24, or 25 bases upstream of the PAM.

[0625] The base editors of the present disclosure can comprise any domain, feature or amino acid sequence which facilitates the editing of a target polynucleotide sequence. For example, in some embodiments, the base editor comprises a nuclear localization sequence (NLS). In some embodiments, an NLS of the base editor is localized between a deaminase domain and a polynucleotide programmable nucleotide binding domain. In some embodiments, an NLS of the base editor is localized C-terminal to a polynucleotide programmable nucleotide binding domain.

[0626] Other exemplary features that can be present in a base editor as disclosed herein are localization sequences, such as cytoplasmic localization sequences, export sequences, such as nuclear export sequences, or other localization sequences, as well as sequence tags that are useful for solubilization, purification, or detection of the fusion proteins. Suitable protein tags provided herein include, but are not limited to, biotin carboxylase carrier protein (BCCP) tags, myc-tags, calmodulin-tags, FLAG-tags, hemagglutinin (HA)-tags, polyhistidine tags, also referred to as histidine tags or His-tags, maltose binding protein (MBP)-tags, nus-tags, glutathione-S-transferase (GST)-tags, green fluorescent protein (GFP)-tags, thioredoxin-tags, S-tags, Softags (e.g., Softag 1, Softag 3), strep-tags, biotin ligase tags, FlAsH tags, V5 tags, and SBP-tags. Additional suitable sequences will be apparent to those of skill in the art. In some embodiments, the fusion protein comprises one or more His tags.

[0627] Non-limiting examples of protein domains which can be included in the fusion protein include deaminase domains (e.g., cytidine deaminase, adenosine deaminase), a uracil glycosylase inhibitor (UGI) domain, epitope tags, and reporter gene sequences.

[0628] Non-limiting examples of epitope tags include histidine (His) tags, V5 tags, FLAG tags, influenza hemagglutinin (HA) tags, Myc tags, VSV-G tags, and thioredoxin (Trx) tags. Examples of reporter genes include, but are not limited to, glutathione-5-transferase (GST), horseradish peroxidase (HRP), chloramphenicol acetyltransferase (CAT) beta-galactosidase, beta-glucuronidase, luciferase, green fluorescent protein (GFP), HcRed, DsRed, cyan fluorescent protein (CFP), yellow fluorescent protein (YFP), and autofluorescent proteins including blue fluorescent protein (BFP). Additional protein sequences can include amino acid sequences that bind DNA molecules or bind other cellular molecules, including, but not limited to, maltose binding protein (MBP), S-tag, Lex A DNA binding domain (DBD) fusions, GAL4 DNA binding domain fusions, and herpes simplex virus (HSV) BP16 protein fusions.

### Base Editor Efficiency

[0629] CRISPR-Cas9 nucleases have been widely used to mediate targeted genome editing. In most genome editing applications, Cas9 forms a complex with a guide polynucleotide (e.g., single guide RNA (sgRNA)) and induces a double-stranded DNA break (DSB) at the target site specified by the sgRNA sequence. Cells primarily respond to this DSB through the non-homologous end-joining (NHEJ) repair pathway, which results in stochastic insertions or deletions (indels) that can cause frameshift mutations that disrupt the gene. In the presence of a donor DNA template with a high degree of homology to the sequences flanking the DSB, gene correction can be achieved through an alternative pathway known as homology directed repair (HDR). Unfortunately, under most non-perturbative conditions, HDR is inefficient, dependent on cell state and cell type, and dominated by a larger frequency of indels. As most of the known genetic variations associated with human disease are point mutations, methods that can more efficiently and cleanly make precise point mutations are needed. Base editing systems as provided herein provide a new way to provide genome editing without generating double-strand DNA breaks, without requiring a donor DNA template, and without inducing an excess of stochastic insertions and deletions.

[0630] The base editors provided herein are capable of modifying a specific nucleotide base without generating a significant proportion of indels. The term “indel(s)”, as used herein, refers to the insertion or deletion of a nucleotide base within a nucleic acid. Such insertions or deletions can lead to frame shift mutations within a coding region of a gene. In some embodiments, it is desirable to generate base editors that efficiently modify (e.g., mutate or deaminate) a specific nucleotide within a nucleic acid, without generating a large number of insertions or deletions (i.e., indels) in the target nucleotide sequence. In certain embodiments, any of the base editors provided herein are capable of generating a greater proportion of intended modifications (e.g., point mutations or deaminations) versus indels.

[0631] In some embodiments, any of base editor systems provided herein result in less than 50%, less than 40%, less than 30%, less than 20%, less than 19%, less than 18%, less than 17%, less than 16%, less than 15%, less than 14%, less than 13%, less than 12%, less than 11%, less than 10%, less than 9%, less than 8%, less than 7%, less than 6%, less than 5%, less than 4%, less than 3%, less than 2%, less than 1%, less than 0.9%, less than 0.8%, less than 0.7%, less than 0.6%, less than 0.5%, less than 0.4%, less than 0.3%, less than 0.2%, less than 0.1%, less than 0.09%, less than 0.08%, less than 0.07%, less than 0.06%, less than 0.05%, less than 0.04%, less than 0.03%, less than 0.02%, or less than 0.01% indel formation in the target polynucleotide sequence.

[0632] In some embodiments, any of base editor systems comprising one of the ABE8 base editor variants described herein result in less than 50%, less than 40%, less than 30%, less than 20%, less than 19%, less than 18%, less than 17%, less than 16%, less than 15%, less than 14%, less than 13%, less than 12%, less than 11%, less than 10%, less than 9%, less than 8%, less than 7%, less than 6%, less than 5%, less than 4%, less than 3%, less than 2%, less than 1%, less than 0.9%, less than 0.8%, less than 0.7%, less than 0.6%, less than 0.5%, less than 0.4%, less than 0.3%, less than 0.2%, less than 0.1%, less than 0.09%, less than 0.08%, less than 0.07%, less than 0.06%, less than 0.05%, less than 0.04%, less than 0.03%, less than 0.02%, or less than 0.01% indel formation in the target polynucleotide sequence.

[0633] In some embodiments, any of base editor systems comprising one of the ABE8 base editor variants described herein result in less than 0.8% indel formation in the target polynucleotide sequence. In some embodiments, any of base editor systems comprising one of the ABE8 base editor variants described herein result in at most 0.8% indel formation in the target polynucleotide sequence. In some embodiments, any of base editor systems comprising one of the ABE8 base editor variants described herein result in less than 0.3% indel formation in the target polynucleotide sequence. In some embodiments, any of base editor systems comprising one of the ABE8 base editor variants described results in lower indel formation in the target polynucleotide sequence compared to a base editor system comprising one of ABE7 base editors. In some embodiments, any of base editor systems comprising one of the ABE8 base editor variants described herein results in lower indel formation in the target polynucleotide sequence compared to a base editor system comprising an ABE7.10.

[0634] In some embodiments, any of base editor systems comprising one of the ABE8 base editor variants described herein has reduction in indel frequency compared to a base editor system comprising one of the ABE7 base editors. In some embodiments, any of base editor systems comprising one of the ABE8 base editor variants described herein has at least 0.01%, at least 1%, at least 2%, at least 3%, at least 4%, at least 5%, at least 10%, at least 15%, at least 20%, at least 25%, at least 30%, at least 35%, at least 40%, at least 45%, at least 50%, at least 55%, at least 60%, at least 65%, at least 70%, at least 75%, at least 80%, at least 85%, at least 90%, or at least 95% reduction in indel frequency compared to a base editor system comprising one of the ABE7 base editors. In some embodiments, a base editor system comprising one of the ABE8 base editor variants described herein has at least 0.01%, at least 1%, at least 2%, at least 3%, at least 4%, at least 5%, at least 10%, at least 15%, at least 20%, at least 25%, at least 30%, at least 35%, at least 40%, at least 45%, at least 50%, at least 55%, at least 60%, at least 65%, at least 70%, at least 75%, at least 80%, at least 85%, at least 90%, or at least 95% reduction in indel frequency compared to a base editor system comprising an ABE7.10.

[0635] The disclosure provides adenosine deaminase variants (e.g., ABE8 variants) that have increased efficiency and specificity. In particular, the adenosine deaminase variants described herein are more likely to edit a desired base within a polynucleotide, and are less likely to edit bases that are not intended to be altered (e.g., “bystanders”).

[0636] In some embodiments, any of the base editing system comprising one of the ABE8 base editor variants described herein has reduced bystander editing or mutations. In some embodiments, an unintended editing or mutation is a bystander mutation or bystander editing, for example, base editing of a target base (e.g., A or C) in an unintended or non-target position in a target window of a target nucleotide sequence. In some embodiments, any of the base editing system comprising one of the ABE8 base editor variants described herein has reduced bystander editing or mutations compared to a base editor system comprising an ABE7 base editor, e.g., ABE7.10. In some embodiments, any of the base editing system comprising one of the ABE8 base editor variants described herein has reduced bystander editing or mutations by at least 1%, at least 2%, at least 3%, at least 4%, at least 5%, at least 10%, at least 15%, at least 20%, at least 25%, at least 30%, at least 35%, at least 40%, at least 45%, at least 50%, at least 55%, at least 60%, at least 65%, at least 70%, at least 75%, at least 80%, at least 85%, at least 90%, at least 95%, or at least 99% compared to a base editor system comprising an ABE7 base editor, e.g., ABE7.10. In some embodiments, any of the base editing system comprising one of the ABE8 base editor variants described herein has reduced bystander editing or mutations by at least 1.1 fold, at least 1.2 fold, at least 1.3 fold, at least 1.4 fold, at least 1.5 fold, at least 1.6 fold, at least 1.7 fold, at least 1.8 fold, at least 1.9 fold, at least 2.0 fold, at least 2.1 fold, at least 2.2 fold, at least 2.3 fold, at least 2.4 fold, at least 2.5 fold, at least 2.6 fold, at least 2.7 fold, at least 2.8 fold, at least 2.9 fold, or at least 3.0 fold compared to a base editor system comprising an ABE7 base editor, e.g., ABE7.10.

[0637] In some embodiments, any of the base editing system comprising one of the ABE8 base editor variants described herein has reduced spurious editing. In some embodiments, an unintended editing or mutation is a spurious mutation or spurious editing, for example, non-specific editing or guide independent editing of a target base (e.g., A or C) in an unintended or non-target region of the genome. In some embodiments, any of the base editing system comprising one of the ABE8 base editor variants described herein has reduced spurious editing compared to a base editor system comprising an ABE7 base editor, e.g., ABE7.10. In some embodiments, any of the base editing system comprising one of the ABE8 base editor variants described herein has reduced spurious editing by at least 1%, at least 2%, at least 3%, at least 4%, at least 5%, at least 10%, at least 15%, at least 20%, at least 25%, at least 30%, at least 35%, at least 40%, at least 45%, at least 50%, at least 55%, at least 60%, at least 65%, at least 70%, at least 75%, at least 80%, at least 85%, at least 90%, at least 95%, or at least 99% compared to a base editor system comprising an ABE7 base editor, e.g., ABE7.10. In some embodiments, any of the base editing system comprising one of the ABE8 base editor variants described herein has reduced spurious editing by at least 1.1 fold, at least 1.2 fold, at least 1.3 fold, at least 1.4 fold, at least 1.5 fold, at least 1.6 fold, at least 1.7 fold, at least 1.8 fold, at least 1.9 fold, at least 2.0 fold, at least 2.1 fold, at least 2.2 fold, at least 2.3 fold, at least 2.4 fold, at least 2.5 fold, at least 2.6 fold, at least 2.7 fold, at least 2.8 fold, at least 2.9 fold, or at least 3.0 fold compared to a base editor system comprising an ABE7 base editor, e.g., ABE7.10.

[0638] Some aspects of the disclosure are based on the recognition that any of the base editors provided herein are capable of efficiently generating an intended mutation, such as a point mutation, in a nucleic acid (e.g., a nucleic acid within a genome of a subject) without generating a significant number of unintended mutations, such as unintended point mutations (i.e., mutation of bystanders). In some embodiments, any of the base editors provided herein are capable of generating at least 0.01% of intended mutations (i.e. at least 0.01% base editing efficiency). In some embodiments, any of the base editors provided herein are capable of generating at least 0.01%, 1%, 2%, 3%, 4%, 5%, 10%, 15%, 20%, 25%, 30%, 40%, 45%, 50%, 60%, 70%, 80%, 90%, 95%, or 99% of intended mutations.

[0639] In some embodiments, any of the ABE8 base editor variants described herein have at least 0.01%, at least 1%, at least 2%, at least 3%, at least 4%, at least 5%, at least 10%, at least 15%, at least 20%, at least 25%, at least 30%, at least 35%, at least 40%, at least 45%, at least 50%, at least 55%, at least 60%, at least 65%, at least 70%, at least 75%, at least 80%, at least 85%, at least 90%, at least 95%, or at least 99% base editing efficiency. In some embodiments, the base editing efficiency may be measured by calculating the percentage of edited nucleobases in a population of cells. In some embodiments, any of the ABE8 base editor variants described herein have base editing efficiency of at least 0.01%, at least 1%, at least 2%, at least 3%, at least 4%, at least 5%, at least 10%, at least 15%, at least 20%, at least 25%, at least 30%, at least 35%, at least 40%, at least 45%, at least 50%, at least 55%, at least 60%, at least 65%, at least 70%, at least 75%, at least 80%, at least 85%, at least 90%, at least 95%, or at least 99% as measured by edited nucleobases in a population of cells.

[0640] In some embodiments, any of the ABE8 base editor variants described herein has higher base editing efficiency compared to the ABE7 base editors. In some embodiments, any of the ABE8 base editor variants described herein have at least 1%, at least 2%, at least 3%, at least 4%, at least 5%, at least 10%, at least 15%, at least 20%, at least 25%, at least 30%, at least 35%, at least 40%, at least 45%, at least 50%, at least 55%, at least 60%, at least 65%, at least 70%, at least 75%, at least 80%, at least 85%, at least 90%, at least 95%, at least 99%, at least 100%, at least 105%, at least 110%, at least 115%, at least 120%, at least 125%, at least 130%, at least 135%, at least 140%, at least 145%, at least 150%, at least 155%, at least 160%, at least 165%, at least 170%, at least 175%, at least 180%, at least 185%, at least 190%, at least 195%, at least 200%, at least 210%, at least 220%, at least 230%, at least 240%, at least 250%, at least 260%, at least 270%, at least 280%, at least 290%, at least 300%, at least 310%, at least 320%, at least 330%, at least 340%, at least 350%, at least 360%, at least 370%, at least 380%, at least 390%, at least 400%, at least 450%, or at least 500% higher base editing efficiency compared to an ABE7 base editor, e.g., ABE7.10.

[0641] In some embodiments, any of the ABE8 base editor variants described herein has at least 1.1 fold, at least 1.2 fold, at least 1.3 fold, at least 1.4 fold, at least 1.5 fold, at least 1.6 fold, at least 1.7 fold, at least 1.8 fold, at least 1.9 fold, at least 2.0 fold, at least 2.1 fold, at least 2.2 fold, at least 2.3 fold, at least 2.4 fold, at least 2.5 fold, at least 2.6 fold, at least 2.7 fold, at least 2.8 fold, at least 2.9 fold, at least 3.0 fold, at least 3.1 fold, at least 3.2, at least 3.3 fold, at least 3.4 fold, at least 3.5 fold, at least 3.6 fold, at least 3.7 fold, at least 3.8 fold, at least 3.9 fold, at least 4.0 fold, at least 4.1 fold, at least 4.2 fold, at least 4.3 fold, at least 4.4 fold, at least 4.5 fold, at least 4.6 fold, at least 4.7 fold, at least 4.8 fold, at least 4.9 fold, or at least 5.0 fold higher base editing efficiency compared to an ABE7 base editor, e.g., ABE7.10.

[0642] In some embodiments, any of the ABE8 base editor variants described herein have at least 0.01%, at least 1%, at least 2%, at least 3%, at least 4%, at least 5%, at least 10%, at least 15%, at least 20%, at least 25%, at least 30%, at least 35%, at least 40%, at least 45%, at least 50%, at least 55%, at least 60%, at least 65%, at least 70%, at least 75%, at least 80%, at least 85%, at least 90%, at least 95%, or at least 99% on-target base editing efficiency. In some embodiments, any of the ABE8 base editor variants described herein have on-target base editing efficiency of at least 0.01%, at least 1%, at least 2%, at least 3%, at least 4%, at least 5%, at least 10%, at least 15%, at least 20%, at least 25%, at least 30%, at least 35%, at least 40%, at least 45%, at least 50%, at least 55%, at least 60%, at least 65%, at least 70%, at least 75%, at least 80%, at least 85%, at least 90%, at least 95%, or at least 99% as measured by edited target nucleobases in a population of cells.

[0643] In some embodiments, any of the ABE8 base editor variants described herein has higher on-target base editing efficiency compared to the ABE7 base editors. In some embodiments, any of the ABE8 base editor variants described herein have at least 1%, at least 2%, at least 3%, at least 4%, at least 5%, at least 10%, at least 15%, at least 20%, at least 25%, at least 30%, at least 35%, at least 40%, at least 45%, at least 50%, at least 55%, at least 60%, at least 65%, at least 70%, at least 75%, at least 80%, at least 85%, at least 90%, at least 95%, at least 99%, at least 100%, at least 105%, at least 110%, at least 115%, at least 120%, at least 125%, at least 130%, at least 135%, at least 140%, at least 145%, at least 150%, at least 155%, at least 160%, at least 165%, at least 170%, at least 175%, at least 180%, at least 185%, at least 190%, at least 195%, at least 200%, at least 210%, at least 220%, at least 230%, at least 240%, at least 250%, at least 260%, at least 270%, at least 280%, at least 290%, at least 300%, at least 310%, at least 320%, at least 330%, at least 340%, at least 350%, at least 360%, at least 370%, at least 380%, at least 390%, at least 400%, at least 450%, or at least 500% higher on-target base editing efficiency compared to an ABE7 base editor, e.g., ABE7.10.

[0644] In some embodiments, any of the ABE8 base editor variants described herein has at least 1.1 fold, at least 1.2 fold, at least 1.3 fold, at least 1.4 fold, at least 1.5 fold, at least 1.6 fold, at least 1.7 fold, at least 1.8 fold, at least 1.9 fold, at least 2.0 fold, at least 2.1 fold, at least 2.2 fold, at least 2.3 fold, at least 2.4 fold, at least 2.5 fold, at least 2.6 fold, at least 2.7 fold, at least 2.8 fold, at least 2.9 fold, at least 3.0 fold, at least 3.1 fold, at least 3.2 fold, at least 3.3 fold, at least 3.4 fold, at least 3.5 fold, at least 3.6 fold, at least 3.7 fold, at least 3.8 fold, at least 3.9 fold, at least 4.0 fold, at least 4.1 fold, at least 4.2 fold, at least 4.3 fold, at least 4.4 fold, at least 4.5 fold, at least 4.6 fold, at least 4.7 fold, at least 4.8 fold, at least 4.9 fold, or at least 5.0 fold higher on-target base editing efficiency compared to an ABET base editor, e.g., ABE7.10.

[0645] The ABE8 base editor variants described herein may be delivered to a host cell via a plasmid, a vector, a LNP complex, or an mRNA. In some embodiments, any of the ABE8 base editor variants described herein is delivered to a host cell as an mRNA. In some embodiments, an ABE8 base editor delivered via a nucleic acid based delivery system, e.g., an mRNA, has on-target editing efficiency of at least at least 1%, at least 2%, at least 3%, at least 4%, at least 5%, at least 10%, at least 15%, at least 20%, at least 25%, at least 30%, at least 35%, at least 40%, at least 45%, at least 50%, at least 55%, at least 60%, at least 65%, at least 70%, at least 75%, at least 80%, at least 85%, at least 90%, at least 95%, or at least 99% as measured by edited nucleobases. In some embodiments, an ABE8 base editor delivered by an mRNA system has higher base editing efficiency compared to an ABE8 base editor delivered by a plasmid or vector system. In some embodiments, any of the ABE8 base editor variants described herein has at least 1%, at least 2%, at least 3%, at least 4%, at least 5%, at least 10%, at least 15%, at least 20%, at least 25%, at least 30%, at least 35%, at least 40%, at least 45%, at least 50%, at least 55%, at least 60%, at least 65%, at least 70%, at least 75%, at least 80%, at least 85%, at least 90%, at least 95%, at least 99%, at least 100%, at least 105%, at least 110%, at least 115%, at least 120%, at least 125%, at least 130%, at least 135%, at least 140%, at least 145%, at least 150%, at least 155%, at least 160%, at least 165%, at least 170%, at least 175%, at least 180%, at least 185%, at least 190%, at least 195%, at least 200%, at least 210%, at least 220%, at least 230%, at least 240%, at least 250%, at least 260%, at least 270%, at least 280%, at least 290%, at least 300% higher, at least 310%, at least 320%, at least 330%, at least 340%, at least 350%, at least 360%, at least 370%, at least 380%, at least 390%, at least 400%, at least 450%, or at least 500% on-target editing efficiency when delivered by an mRNA system compared to when delivered by a plasmid or vector system. In some embodiments, any of the ABE8 base editor variants described herein has at least 1.1 fold, at least 1.2 fold, at least 1.3 fold, at least 1.4 fold, at least 1.5 fold, at least 1.6 fold, at least 1.7 fold, at least 1.8 fold, at least 1.9 fold, at least 2.0 fold, at least 2.1 fold, at least 2.2 fold, at least 2.3 fold, at least 2.4 fold, at least 2.5 fold, at least 2.6 fold, at least 2.7 fold, at least 2.8 fold, at least 2.9 fold, at least 3.0 fold, at least 3.1 fold, at least 3.2 fold, at least 3.3 fold, at least 3.4 fold, at least 3.5 fold, at least 3.6 fold, at least 3.7 fold, at least 3.8 fold, at least 3.9 fold, at least 4.0 fold, at least 4.1 fold, at least 4.2 fold, at least 4.3 fold, at least 4.4 fold, at least 4.5 fold, at least 4.6 fold, at least 4.7 fold, at least 4.8 fold, at least 4.9 fold, or at least 5.0 fold higher on-target editing efficiency when delivered by an mRNA system compared to when delivered by a plasmid or vector system.

[0646] In some embodiments, any of base editor systems comprising one of the ABE8 base editor variants described herein result in less than 50%, less than 40%, less than 30%, less than 20%, less than 19%, less than 18%, less than 17%, less than 16%, less than 15%, less than 14%, less than 13%, less than 12%, less than 11%, less than 10%, less than 9%, less than 8%, less than 7%, less than 6%, less than 5%, less than 4%, less than 3%, less than 2%, less than 1%, less than 0.9%, less than 0.8%, less than 0.7%, less than 0.6%, less than 0.5%, less than 0.4%, less than 0.3%, less than 0.2%, less than 0.1%, less than 0.09%, less than 0.08%, less than 0.07%, less than 0.06%, less than 0.05%, less than 0.04%, less than 0.03%, less than 0.02%, or less than 0.01% off-target editing in the target polynucleotide sequence.

[0647] In some embodiments, any of the ABE8 base editor variants described herein has lower guided off-target editing efficiency when delivered by an mRNA system compared to when delivered by a plasmid or vector system. In some embodiments, any of the ABE8 base editor variants described herein has at least 1%, at least 2%, at least 3%, at least 4%, at least 5%, at least 10%, at least 15%, at least 20%, at least 25%, at least 30%, at least 35%, at least 40%, at least 45%, at least 50%, at least 55%, at least 60%, at least 65%, at least 70%, at least 75%, at least 80%, at least 85%, at least 90%, at least 95%, or at least 99% lower guided off-target editing efficiency when delivered by an mRNA system compared to when delivered by a plasmid or vector system. In some embodiments, any of the ABE8 base editor variants described herein has at least 1.1 fold, at least 1.2 fold, at least 1.3 fold, at least 1.4 fold, at least 1.5 fold, at least 1.6 fold, at least 1.7 fold, at least 1.8 fold, at least 1.9 fold, at least 2.0 fold, at least 2.1 fold, at least 2.2 fold, at least 2.3 fold, at least 2.4 fold, at least 2.5 fold, at least 2.6 fold, at least 2.7 fold, at least 2.8 fold, at least 2.9 fold, or at least 3.0 fold lower guided off-target editing efficiency when delivered by an mRNA system compared to when delivered by a plasmid or vector system. In some embodiments, any of the ABE8 base editor variants described herein has at least about 2.2 fold decrease in guided off-target editing efficiency when delivered by an mRNA system compared to when delivered by a plasmid or vector system.

[0648] In some embodiments, any of the ABE8 base editor variants described herein has lower guide-independent off-target editing efficiency when delivered by an mRNA system compared to when delivered by a plasmid or vector system. In some embodiments, any of the ABE8 base editor variants described herein has at least 1%, at least 2%, at least 3%, at least 4%, at least 5%, at least 10%, at least 15%, at least 20%, at least 25%, at least 30%, at least 35%, at least 40%, at least 45%, at least 50%, at least 55%, at least 60%, at least 65%, at least 70%, at least 75%, at least 80%, at least 85%, at least 90%, at least 95%, or at least 99% lower guide-independent off-target editing efficiency when delivered by an mRNA system compared to when delivered by a plasmid or vector system. In some embodiments, any of the ABE8 base editor variants described herein has at least 1.1 fold, at least 1.2 fold, at least 1.3 fold, at least 1.4 fold, at least 1.5 fold, at least 1.6 fold, at least 1.7 fold, at least 1.8 fold, at least 1.9 fold, at least 2.0 fold, at least 2.1 fold, at least 2.2 fold, at least 2.3 fold, at least 2.4 fold, at least 2.5 fold, at least 2.6 fold, at least 2.7 fold, at least 2.8 fold, at least 2.9 fold, at least 3.0 fold, at least 5.0 fold, at least 10.0 fold, at least 20.0 fold, at least 50.0 fold, at least 70.0 fold, at least 100.0 fold, at least 120.0 fold, at least 130.0 fold, or at least 150.0 fold lower guide-independent off-target editing efficiency when delivered by an mRNA system compared to when delivered by a plasmid or vector system. In some embodiments, ABE8 base editor variants described herein has 134.0 fold decrease in guide-independent off-target editing efficiency (e.g., spurious RNA deamination) when delivered by an mRNA system compared to when delivered by a plasmid or vector system. In some embodiments, ABE8 base editor variants described herein does not increase guide-independent mutation rates across the genome.

[0649] Some aspects of the disclosure are based on the recognition that any of the base editors provided herein are capable of efficiently generating an intended mutation, such as a point mutation, in a nucleic acid (e.g., a nucleic acid within a genome of a subject) without generating a significant number of unintended mutations, such as unintended point mutations. In some embodiments, any of the base editors provided herein are capable of generating at least 0.01% of intended mutations (e.g., spurious off-target editing or bystander editing). In some embodiments, an intended mutation is a mutation that is generated by a specific base editor bound to a gRNA, specifically designed to alter or correct a mutation in a target gene. Some aspects of the disclosure are based on the recognition that any of the base editors provided herein are capable of efficiently generating an intended mutation in a nucleic acid (e.g. a nucleic acid within a genome of a subject) without generating a significant number of unintended mutations. In some embodiments, an intended mutation is a mutation that is generated by a specific base editor bound to a gRNA, specifically designed to alter or correct an intended mutation. In some embodiments, the intended mutation is a mutation that generates a stop codon, for example, a premature stop codon within the coding region of a gene. In some embodiments, the intended mutation is a mutation that eliminates a stop codon. In some embodiments, the intended mutation is a mutation that alters the splicing of a gene. In some embodiments, the intended mutation is a mutation that alters the regulatory sequence of a gene (e.g., a gene promotor or gene repressor).

[0650] In some embodiments, the base editors provided herein are capable of generating a ratio of intended point mutations to indels that is greater than 1:1. In some embodiments, the base editors provided herein are capable of generating a ratio of intended point mutations to indels that is at least 1.5:1, at least 2:1, at least 2.5:1, at least 3:1, at least 3.5:1, at least 4:1, at least 4.5:1, at least 5:1, at least 5.5:1, at least 6:1, at least 6.5:1, at least 7:1, at least 7.5:1, at least 8:1, at least 8.5:1, at least 9:1, at least 10:1, at least 11:1, at least 12:1, at least 13:1, at least 14:1, at least 15:1, at least 20:1, at least 25:1, at least 30:1, at least 40:1, at least 50:1, at least 100:1, at least 200:1, at least 300:1, at least 400:1, at least 500:1, at least 600:1, at least 700:1, at least 800:1, at least 900:1, or at least 1000:1, or more.

[0651] The number of intended mutations and indels can be determined using any suitable method, for example, as described in International PCT Application Nos. PCT/2017/045381 (WO2018/027078) and PCT/US2016/058344 (WO2017/070632); Komor, A. C., et al., “Programmable editing of a target base in genomic DNA without double-stranded DNA cleavage” Nature 533, 420-424 (2016); Gaudelli, N. M., et al., “Programmable base editing of A•T to G•C in genomic DNA without DNA cleavage” Nature 551, 464-471 (2017); and Komor, A. C., et al., “Improved base excision repair inhibition and bacteriophage Mu Gam protein yields C:G-to-T:A base editors with higher efficiency and product purity” Science Advances 3:eaao4774 (2017); the entire contents of which are hereby incorporated by reference.

[0652] In some embodiments, to calculate indel frequencies, sequencing reads are scanned for exact matches to two 10-bp sequences that flank both sides of a window in which indels can occur. If no exact matches are located, the read is excluded from analysis. If the length of this indel window exactly matches the reference sequence the read is classified as not containing an indel. If the indel window is two or more bases longer or shorter than the reference sequence, then the sequencing read is classified as an insertion or deletion, respectively. In some embodiments, the base editors provided herein can limit formation of indels in a region of a nucleic acid. In some embodiments, the region is at a nucleotide targeted by a base editor or a region within 2, 3, 4, 5, 6, 7, 8, 9, or 10 nucleotides of a nucleotide targeted by a base editor.

[0653] The number of indels formed at a target nucleotide region can depend on the amount of time a nucleic acid (e.g., a nucleic acid within the genome of a cell) is exposed to a base editor. In some embodiments, the number or proportion of indels is determined after at least 1 hour, at least 2 hours, at least 6 hours, at least 12 hours, at least 24 hours, at least 36 hours, at least 48 hours, at least 3 days, at least 4 days, at least 5 days, at least 7 days, at least 10 days, or at least 14 days of exposing the target nucleotide sequence (e.g., a nucleic acid within the genome of a cell) to a base editor. It should be appreciated that the characteristics of the base editors as described herein can be applied to any of the fusion proteins, or methods of using the fusion proteins provided herein.

[0654] In some embodiments, the base editors provided herein are capable of limiting formation of indels in a region of a nucleic acid. In some embodiments, the region is at a nucleotide targeted by a base editor or a region within 2, 3, 4, 5, 6, 7, 8, 9, or 10 nucleotides of a nucleotide targeted by a base editor. In some embodiments, any of the base editors provided herein are capable of limiting the formation of indels at a region of a nucleic acid to less than 1%, less than 1.5%, less than 2%, less than 2.5%, less than 3%, less than 3.5%, less than 4%, less than 4.5%, less than 5%, less than 6%, less than 7%, less than 8%, less than 9%, less than 10%, less than 12%, less than 15%, or less than 20%. The number of indels formed at a nucleic acid region may depend on the amount of time a nucleic acid (e.g., a nucleic acid within the genome of a cell) is exposed to a base editor. In some embodiments, any number or proportion of indels is determined after at least 1 hour, at least 2 hours, at least 6 hours, at least 12 hours, at least 24 hours, at least 36 hours, at least 48 hours, at least 3 days, at least 4 days, at least 5 days, at least 7 days, at least 10 days, or at least 14 days of exposing a nucleic acid (e.g., a nucleic acid within the genome of a cell) to a base editor.

### Multiplex Editing

[0655] In some embodiments, the base editor system provided herein is capable of multiplex editing of a plurality of nucleobase pairs in one or more genes. In some embodiments, the plurality of nucleobase pairs is located in the same gene. In some embodiments, the plurality of nucleobase pairs is located in one or more gene, wherein at least one gene is located in a different locus. In some embodiments, the multiplex editing can comprise one or more guide polynucleotides. In some embodiments, the multiplex editing can comprise one or more base editor system. In some embodiments, the multiplex editing can comprise one or more base editor systems with a single guide polynucleotide. In some embodiments, the multiplex editing can comprise one or more base editor system with a plurality of guide polynucleotides. In some embodiments, the multiplex editing can comprise one or more guide polynucleotide with a single base editor system. In some embodiments, the multiplex editing can comprise at least one guide polynucleotide that does not require a PAM sequence to target binding to a target polynucleotide sequence. In some embodiments, the multiplex editing can comprise at least one guide polynucleotide that requires a PAM sequence to target binding to a target polynucleotide sequence. In some embodiments, the multiplex editing can comprise a mix of at least one guide polynucleotide that does not require a PAM sequence to target binding to a target polynucleotide sequence and at least one guide polynucleotide that require a PAM sequence to target binding to a target polynucleotide sequence. It should be appreciated that the characteristics of the multiplex editing using any of the base editors as described herein can be applied to any of combination of the methods of using any of the base editor provided herein. It should also be appreciated that the multiplex editing using any of the base editors as described herein can comprise a sequential editing of a plurality of nucleobase pairs.

[0656] In some embodiments, the plurality of nucleobase pairs are in one more genes. In some embodiments, the plurality of nucleobase pairs is in the same gene. In some embodiments, at least one gene in the one more genes is located in a different locus.

[0657] In some embodiments, the editing is editing of the plurality of nucleobase pairs in at least one protein coding region. In some embodiments, the editing is editing of the plurality of nucleobase pairs in at least one protein non-coding region. In some embodiments, the editing is editing of the plurality of nucleobase pairs in at least one protein coding region and at least one protein non-coding region.

[0658] In some embodiments, the editing is in conjunction with one or more guide polynucleotides. In some embodiments, the base editor system can comprise one or more base editor system. In some embodiments, the base editor system can comprise one or more base editor systems in conjunction with a single guide polynucleotide. In some embodiments, the base editor system can comprise one or more base editor system in conjunction with a plurality of guide polynucleotides. In some embodiments, the editing is in conjunction with one or more guide polynucleotide with a single base editor system. In some embodiments, the editing is in conjunction with at least one guide polynucleotide that does not require a PAM sequence to target binding to a target polynucleotide sequence. In some embodiments, the editing is in conjunction with at least one guide polynucleotide that require a PAM sequence to target binding to a target polynucleotide sequence. In some embodiments, the editing is in conjunction with a mix of at least one guide polynucleotide that does not require a PAM sequence to target binding to a target polynucleotide sequence and at least one guide polynucleotide that require a PAM sequence to target binding to a target polynucleotide sequence. It should be appreciated that the characteristics of the multiplex editing using any of the base editors as described herein can be applied to any of combination of the methods of using any of the base editors provided herein. It should also be appreciated that the editing can comprise a sequential editing of a plurality of nucleobase pairs.

### Methods of Using Base Editors

[0659] Base editing of genes and alleles opens up new strategies for therapeutics and basic research.

[0660] The present disclosure provides methods for the treatment of a subject diagnosed with a disease associated with or caused by a point mutation that can be corrected by a base editor system provided herein. For example, in some embodiments, a method is provided that comprises administering to a subject having such a disease, e.g., a disease caused by a genetic mutation, an effective amount of a nucleobase editor (e.g., an adenosine deaminase base editor or a cytidine deaminase base editor) that corrects the point mutation in the disease associated gene.

[0661] It will be understood that the numbering of the specific positions or residues in the respective sequences, e.g., polynucleotide or amino acid sequences of a disease-related gene or its encoded protein, respectively, depends on the particular protein and numbering scheme used. Numbering can be different, e.g., in precursors of a mature protein and the mature protein itself, and differences in sequences from species to species can affect numbering. One of skill in the art will be able to identify the respective residue in any homologous protein and in the respective encoding nucleic acid by methods well known in the art, e.g., by sequence alignment and determination of homologous residues.

[0662] Provided herein are methods of using the base editor or base editor system for editing a nucleobase in a target nucleotide sequence associated with a disease or disorder. In some embodiments, the activity of the base editor (e.g., comprising an adenosine deaminase and a Cas9 domain) results in a correction of the point mutation. In some embodiments, the target DNA sequence comprises a G→A point mutation associated with a disease or disorder, and wherein the deamination of the mutant A base results in a sequence that is not associated with a disease or disorder. In some embodiments, the target DNA sequence comprises a T→C point mutation associated with a disease or disorder, and wherein the deamination of the mutant C base results in a sequence that is not associated with a disease or disorder.

[0663] In some embodiments, the target DNA sequence encodes a protein (e.g., LKKR2), and the point mutation is in a codon and results in a change in the amino acid encoded by the mutant codon as compared to the wild-type codon. In some embodiments, the deamination of the mutant A results in a change of the amino acid encoded by the mutant codon. In some embodiments, the deamination of the mutant A results in the codon encoding the wild-type amino acid. In some embodiments, the deamination of the mutant C results in a change of the amino acid encoded by the mutant codon. In some embodiments, the deamination of the mutant C results in the codon encoding the wild-type amino acid. In some embodiments, the subject has or has been diagnosed with a disease or disorder.

[0664] In some embodiments, the adenosine deaminases provided herein are capable of deaminating adenine of a deoxyadenosine residue of DNA. Other aspects of the disclosure provide fusion proteins that comprise an adenosine deaminase (e.g., an adenosine deaminase that deaminates deoxyadenosine in DNA as described herein) and a domain (e.g., a Cas9 or a Cpf1 protein) capable of binding to a specific nucleotide sequence. For example, the adenosine can be converted to an inosine residue, which typically base pairs with a cytosine residue. Such fusion proteins are useful inter alia for targeted editing of nucleic acid sequences. Such fusion proteins can be used for targeted editing of DNA in vitro, e.g., for the generation of mutant cells or animals; for the introduction of targeted mutations, e.g., for the correction of genetic defects in cells ex vivo, e.g., in cells obtained from a subject that are subsequently re-introduced into the same or another subject; and for the introduction of targeted mutations in vivo, e.g., the correction of genetic defects or the introduction of deactivating mutations in disease-associated genes in a G to A, or a T to C to mutation can be treated using the nucleobase editors provided herein. The present disclosure provides deaminases, fusion proteins, nucleic acids, vectors, cells, compositions, methods, kits, systems, etc. that utilize the deaminases and nucleobase editors.

### Generating an Intended Mutation

[0665] In some embodiments, the purpose of the methods provided herein is to restore the function of a dysfunctional gene via gene editing. In some embodiments, the function of a dysfunctional gene is restored by introducing an intended mutation. The nucleobase editing proteins provided herein can be validated for gene editing-based human therapeutics in vitro, e.g., by correcting a disease-associated mutation in human cell culture. It will be understood by the skilled artisan that the nucleobase editing proteins provided herein, e.g., the fusion proteins comprising a polynucleotide programmable nucleotide binding domain (e.g., Cas9) and a nucleobase editing domain (e.g., an adenosine deaminase domain or a cytidine deaminase domain) can be used to correct any single point A to G or C to T mutation. In the first case, deamination of the mutant A to I corrects the mutation, and in the latter case, deamination of the A that is base-paired with the mutant T, followed by a round of replication, corrects the mutation.

[0666] In some embodiments, the present disclosure provides base editors that can efficiently generating an intended mutation, such as a point mutation, in a nucleic acid (e.g., a nucleic acid within a genome of a subject) without generating a significant number of unintended mutations, such as unintended point mutations. In some embodiments, an intended mutation is a mutation that is generated by a specific base editor (e.g., cytidine base editor or adenosine base editor) bound to a guide polynucleotide (e.g., gRNA), specifically designed to generate the intended mutation. In some embodiments, the intended mutation is a mutation associated with a disease or disorder. In some embodiments, the intended mutation is an adenine (A) to guanine (G) point mutation associated with a disease or disorder. In some embodiments, the intended mutation is a cytosine (C) to thymine (T) point mutation associated with a disease or disorder. In some embodiments, the intended mutation is an adenine (A) to guanine (G) point mutation within the coding region or non-coding region of a gene. In some embodiments, the intended mutation is a cytosine (C) to thymine (T) point mutation within the coding region or non-coding region of a gene. In some embodiments, the intended mutation is a point mutation that generates a stop codon, for example, a premature stop codon within the coding region of a gene. In some embodiments, the intended mutation is a mutation that eliminates a stop codon.

[0667] In some embodiments, any of the base editors provided herein are capable of generating a ratio of intended mutations to unintended mutations (e.g., intended point mutations:unintended point mutations) that is greater than 1:1. In some embodiments, any of the base editors provided herein are capable of generating a ratio of intended mutations to unintended mutations (e.g., intended point mutations:unintended point mutations) that is at least 1.5:1, at least 2:1, at least 2.5:1, at least 3:1, at least 3.5:1, at least 4:1, at least 4.5:1, at least 5:1, at least 5.5:1, at least 6:1, at least 6.5:1, at least 7:1, at least 7.5:1, at least 8:1, at least 10:1, at least 12:1, at least 15:1, at least 20:1, at least 25:1, at least 30:1, at least 40:1, at least 50:1, at least 100:1, at least 150:1, at least 200:1, at least 250:1, at least 500:1, or at least 1000:1, or more

[0668] Details of base editor efficiency are described in International PCT Application Nos. PCT/2017/045381 (WO2018/027078) and PCT/US2016/058344 (WO2017/070632), each of which is incorporated herein by reference for its entirety. Also see Komor, A. C., et al., “Programmable editing of a target base in genomic DNA without double-stranded DNA cleavage” Nature 533, 420-424 (2016); Gaudelli, N. M., et al., “Programmable base editing of A•T to G•C in genomic DNA without DNA cleavage” Nature 551, 464-471 (2017); and Komor, A. C., et al., “Improved base excision repair inhibition and bacteriophage Mu Gam protein yields C:G-to-T:A base editors with higher efficiency and product purity” Science Advances 3:eaao4774 (2017), the entire contents of which are hereby incorporated by reference.

[0669] In some embodiments, the editing of the plurality of nucleobase pairs in one or more genes result in formation of at least one intended mutation. In some embodiments, the formation of the at least one intended mutation results in a precise correction of a disease causing mutation. It should be appreciated that the characteristics of the multiplex editing of the base editors as described herein can be applied to any of combination of the methods of using the base editor provided herein.

### Expression of Fusion Proteins in a Host Cell

[0670] Fusion proteins of the disclosure comprising an adenosine deaminase variant may be expressed in virtually any host cell of interest using routine methods known to the skilled artisan. For example, a DNA encoding an adenosine deaminase of the disclosure can be cloned by designing suitable primers for the upstream and downstream of CDS based on the cDNA sequence. The cloned DNA may be directly, or after digestion with a restriction enzyme when desired, or after addition of a suitable linker and/or a nuclear localization signal ligated with a DNA encoding one or more additional components of a base editing system. The base editing system is translated in a host cell to form a complex.

[0671] A DNA encoding a protein domain described herein can be obtained by chemically synthesizing the DNA, or by connecting synthesized partly overlapping oligoDNA short chains by utilizing the PCR method and the Gibson Assembly method to construct a DNA encoding the full length thereof. The advantage of constructing a full-length DNA by chemical synthesis or a combination of PCR method or Gibson Assembly method is that the codon to be used can be designed in CDS full-length according to the host into which the DNA is introduced. In the expression of a heterologous DNA, the protein expression level is expected to increase by converting the DNA sequence thereof to a codon highly frequently used in the host organism. As the data of codon use frequency in host to be used, for example, the genetic code use frequency database (kazusa.or.jp/codon/index.html) disclosed in the home page of Kazusa DNA Research Institute can be used, or documents showing the codon use frequency in each host may be referred to. By reference to the obtained data and the DNA sequence to be introduced, codons showing low use frequency in the host from among those used for the DNA sequence may be converted to a codon coding the same amino acid and showing high use frequency.

[0672] An expression vector containing a DNA encoding a nucleic acid sequence-recognizing module and/or a nucleic acid base converting enzyme can be produced, for example, by linking the DNA to the downstream of a promoter in a suitable expression vector. In some embodiments, animal cell expression plasmids (e.g., pA1-11, pXT1, pRc/CMV, pRc/RSV, pcDNAI/Neo), and animal virus vectors such as retrovirus, vaccinia virus, adenovirus, and the like are used.

[0673] In some embodiments, any promoter appropriate for a host to be used for gene expression can be used. In a conventional method using DSB, since the survival rate of the host cell sometimes decreases markedly due to the toxicity, it is desirable to increase the number of cells by the start of the induction by using an inductive promoter. However, since sufficient cell proliferation can also be afforded by expressing the nucleic acid-modifying enzyme complex of the present disclosure, a constitution promoter can also be used without limitation.

[0674] For example, when the host is an animal cell, SRα promoter, SV40 promoter, LTR promoter, CMV (cytomegalovirus) promoter, RSV (Rous sarcoma virus) promoter, MoMuLV (Moloney mouse leukemia virus) LTR, HSV-TK (simple herpes virus thymidine kinase) promoter and the like are used. Of these, CMV promoter, SRα promoter and the like are preferable.

[0675] As the expression vector, besides those mentioned above, one containing enhancer, splicing signal, terminator, polyA addition signal, a selection marker such as drug resistance gene, auxotrophic complementary gene and the like, replication origin and the like on demand can be used.

[0676] An RNA encoding a protein domain described herein can be prepared by, for example, transcription to mRNA in a vitro transcription system known per se by using a vector encoding DNA encoding the above-mentioned nucleic acid sequence-recognizing module and/or a nucleic acid base converting enzyme as a template.

[0677] A fusion protein of the disclosure can be intracellularly expressed by introducing an expression vector containing a DNA encoding a nucleic acid sequence-recognizing module and/or a nucleic acid base converting enzyme into a host cell, and culturing the host cell.

[0678] As the animal cell, cell lines such as monkey COS-7 cell, monkey Vero cell, Chinese hamster ovary (CHO) cell, dhfr gene-deficient CHO cell, mouse L cell, mouse AtT-20 cell, mouse myeloma cell, rat GH3 cell, human FL cell and the like, pluripotent stem cells such as iPS cell, ES cell and the like of human and other mammals, and primary cultured cells prepared from various tissues are used. Furthermore, zebrafish embryo, Xenopus oocyte and the like can also be used.

[0679] All the above-mentioned host cells may be haploid (monoploid), or polyploid (e.g., diploid, triploid, tetraploid and the like). In the conventional mutation introduction methods, mutation is, in principle, introduced into only one homologous chromosome to produce a hetero gene type. Therefore, desired phenotype is not expressed unless dominant mutation occurs, and homozygousness inconveniently requires labor and time. In contrast, according to the present disclosure, since mutation can be introduced into any allele on the homologous chromosome in the genome, desired phenotype can be expressed in a single generation even in the case of recessive mutation, which is extremely useful since the problem of the conventional method can be solved.

[0680] An expression vector can be introduced by a known method (e.g., lysozyme method, competent method, PEG method, CaCl₂ coprecipitation method, electroporation method, the microinjection method, the particle gun method, lipofection method, Agrobacterium method and the like) according to the kind of the host.

[0681] An animal cell can be introduced into a vector according to the methods described in, for example, Cell Engineering additional volume 8, New Cell Engineering Experiment Protocol, 263-267 (1995) (published by Shujunsha), and Virology, 52, 456 (1973). A cell introduced with a vector can be cultured according to a known method according to the kind of the host.

[0682] As a medium for culturing an animal cell, for example, minimum essential medium (MEM) containing about 5 to about 20% of fetal bovine serum (Science, 122, 501 (1952)), Dulbecco's modified Eagle medium (DMEM) (Virology, 8, 396 (1959)), RPMI 1640 medium (The Journal of the American Medical Association, 199, 519 (1967)), 199 medium (Proceeding of the Society for the Biological Medicine, 73, 1 (1950)) and the like are used. The pH of the medium is preferably about 6 to about 8. The culture is performed at generally about 30° C. to about 40° C. Where necessary, aeration and stirring may be performed.

[0683] When a higher eukaryotic cell, such as animal cell, is used as a host cell, a DNA encoding a base editing system of the present disclosure (e.g., comprising an adenosine deaminase variant) is introduced into a host cell under the regulation of an inducible promoter (e.g., metallothionein promoter (induced by heavy metal ion), heat shock protein promoter (induced by heat shock), Tet-ON/Tet-OFF system promoter (induced by addition or removal of tetracycline or a derivative thereof), steroid-responsive promoter (induced by steroid hormone or a derivative thereof) etc.), the induction substance is added to the medium (or removed from the medium) at an appropriate stage to induce expression of the nucleic acid-modifying enzyme complex, culture is performed for a given period to carry out a base editing and, introduction of a mutation into a target gene, transient expression of the base editing system can be realized.

[0684] Alternatively, the above-mentioned inductive promoter can also be utilized as a vector removal mechanism when higher eukaryotic cells, such as animal cell and the like are used as a host cell. That is, a vector is mounted with a replication origin that functions in a host cell, and a nucleic acid encoding a protein necessary for replication (e.g., SV40 on and large T antigen, oriP and EBNA-1 etc. for animal cells), of the expression of the nucleic acid encoding the protein is regulated by the above-mentioned inducible promoter. As a result, while the vector is autonomously replicatable in the presence of an induction substance, when the induction substance is removed, autonomous replication is not available, and the vector naturally falls off along with cell division (autonomous replication is not possible by the addition of tetracycline and doxycycline in Tet-OFF system vector).

### Delivery System

[0685] A base editor disclosed herein can be encoded on a nucleic acid that is contained in a viral vector. Viral vectors can include lentivirus, Adenovirus, Retrovirus, and Adeno-associated viruses (AAVs). Viral vectors can be selected based on the application. For example, AAVs are commonly used for gene delivery in vivo due to their mild immunogenicity. Adenoviruses are commonly used as vaccines because of the strong immunogenic response they induce. Packaging capacity of the viral vectors can limit the size of the base editor that can be packaged into the vector. For example, the packaging capacity of the AAVs is ˜4.5 kb including two 145 base inverted terminal repeats (ITRs).

[0686] AAV is a small, single-stranded DNA dependent virus belonging to the parvovirus family. The 4.7 kb wild-type (wt) AAV genome is made up of two genes that encode four replication proteins and three capsid proteins, respectively, and is flanked on either side by 145-bp inverted terminal repeats (ITRs). The virion is composed of three capsid proteins, Vp1, Vp2, and Vp3, produced in a 1:1:10 ratio from the same open reading frame but from differential splicing (Vp1) and alternative translational start sites (Vp2 and Vp3, respectively). Vp3 is the most abundant subunit in the virion and participates in receptor recognition at the cell surface defining the tropism of the virus. A phospholipase domain, which functions in viral infectivity, has been identified in the unique N terminus of Vp1. Similar to wt AAV, recombinant AAV (rAAV) utilizes the cis-acting 145-bp ITRs to flank vector transgene cassettes, providing up to 4.5 kb for packaging of foreign DNA. Subsequent to infection, rAAV can express a fusion protein of the invention and persist without integration into the host genome by existing episomally in circular head-to-tail concatemers. Although there are numerous examples of rAAV success using this system, in vitro and in vivo, the limited packaging capacity has limited the use of AAV-mediated gene delivery when the length of the coding sequence of the gene is equal or greater in size than the wt AAV genome.

[0687] The small packaging capacity of AAV vectors makes the delivery of a number of genes that exceed this size and/or the use of large physiological regulatory elements challenging. These challenges can be addressed, for example, by dividing the protein(s) to be delivered into two or more fragments, wherein the N-terminal fragment is fused to a split intein-N and the C-terminal fragment is fused to a split intein-C. These fragments are then packaged into two or more AAV vectors. As used herein, “intein” refers to a self-splicing protein intron (e.g., peptide) that ligates flanking N-terminal and C-terminal exteins (e.g., fragments to be joined). The use of certain inteins for joining heterologous protein fragments is described, for example, in Wood et al., J. Biol. Chem. 289(21); 14512-9 (2014). For example, when fused to separate protein fragments, the inteins IntN and IntC recognize each other, splice themselves out and simultaneously ligate the flanking N- and C-terminal exteins of the protein fragments to which they were fused, thereby reconstituting a full-length protein from the two protein fragments. Other suitable inteins will be apparent to a person of skill in the art.

[0688] A fragment of a fusion protein of the invention can vary in length. In some embodiments, a protein fragment ranges from 2 amino acids to about 1000 amino acids in length. In some embodiments, a protein fragment ranges from about 5 amino acids to about 500 amino acids in length. In some embodiments, a protein fragment ranges from about 20 amino acids to about 200 amino acids in length. In some embodiments, a protein fragment ranges from about 10 amino acids to about 100 amino acids in length. Suitable protein fragments of other lengths will be apparent to a person of skill in the art.

[0689] In some embodiments, a portion or fragment of a nuclease (e.g., Cas9) is fused to an intein. The nuclease can be fused to the N-terminus or the C-terminus of the intein. In some embodiments, a portion or fragment of a fusion protein is fused to an intein and fused to an AAV capsid protein. The intein, nuclease and capsid protein can be fused together in any arrangement (e.g., nuclease-intein-capsid, intein-nuclease-capsid, capsid-intein-nuclease, etc.). In some embodiments, the N-terminus of an intein is fused to the C-terminus of a fusion protein and the C-terminus of the intein is fused to the N-terminus of an AAV capsid protein.

[0690] In one embodiment, dual AAV vectors are generated by splitting a large transgene expression cassette in two separate halves (5′ and 3′ ends, or head and tail), where each half of the cassette is packaged in a single AAV vector (of <5 kb). The re-assembly of the full-length transgene expression cassette is then achieved upon co-infection of the same cell by both dual AAV vectors followed by: (1) homologous recombination (HR) between 5′ and 3′ genomes (dual AAV overlapping vectors); (2) ITR-mediated tail-to-head concatemerization of 5′ and 3′ genomes (dual AAV trans-splicing vectors); or (3) a combination of these two mechanisms (dual AAV hybrid vectors). The use of dual AAV vectors in vivo results in the expression of full-length proteins. The use of the dual AAV vector platform represents an efficient and viable gene transfer strategy for transgenes of >4.7 kb in size.

[0691] The disclosed strategies for designing base editors can be useful for generating base editors capable of being packaged into a viral vector. The use of RNA or DNA viral based systems for the delivery of a base editor takes advantage of highly evolved processes for targeting a virus to specific cells in culture or in the host and trafficking the viral payload to the nucleus or host cell genome. Viral vectors can be administered directly to cells in culture, patients (in vivo), or they can be used to treat cells in vitro, and the modified cells can optionally be administered to patients (ex vivo). Conventional viral based systems could include retroviral, lentivirus, adenoviral, adeno-associated and herpes simplex virus vectors for gene transfer. Integration in the host genome is possible with the retrovirus, lentivirus, and adeno-associated virus gene transfer methods, often resulting in long term expression of the inserted transgene. Additionally, high transduction efficiencies have been observed in many different cell types and target tissues.

[0692] The tropism of a retrovirus can be altered by incorporating foreign envelope proteins, expanding the potential target population of target cells. Lentiviral vectors are retroviral vectors that are able to transduce or infect non-dividing cells and typically produce high viral titers. Selection of a retroviral gene transfer system would therefore depend on the target tissue. Retroviral vectors are comprised of cis-acting long terminal repeats with packaging capacity for up to 6-10 kb of foreign sequence. The minimum cis-acting LTRs are sufficient for replication and packaging of the vectors, which are then used to integrate the therapeutic gene into the target cell to provide permanent transgene expression. Widely used retroviral vectors include those based upon murine leukemia virus (MuLV), gibbon ape leukemia virus (GaLV), Simian Immuno deficiency virus (SIV), human immuno deficiency virus (HIV), and combinations thereof (See, e.g., Buchscher et al., J. Virol. 66:2731-2739 (1992); Johann et al., J. Virol. 66:1635-1640 (1992); Sommnerfelt et al., Virol. 176:58-59 (1990); Wilson et al., J. Virol. 63:2374-2378 (1989); Miller et al., J. Virol. 65:2220-2224 (1991); PCT/US94/05700).

[0693] Retroviral vectors, especially lentiviral vectors, can require polynucleotide sequences smaller than a given length for efficient integration into a target cell. For example, retroviral vectors of length greater than 9 kb can result in low viral titers compared with those of smaller size. In some aspects, a base editor of the present disclosure is of sufficient size so as to enable efficient packaging and delivery into a target cell via a retroviral vector. In some cases, a base editor is of a size so as to allow efficient packing and delivery even when expressed together with a guide nucleic acid and/or other components of a targetable nuclease system.

[0694] In applications where transient expression is preferred, adenoviral based systems can be used. Adenoviral based vectors are capable of very high transduction efficiency in many cell types and do not require cell division. With such vectors, high titer and levels of expression have been obtained. This vector can be produced in large quantities in a relatively simple system. Adeno-associated virus (“AAV”) vectors can also be used to transduce cells with target nucleic acids, e.g., in the in vitro production of nucleic acids and peptides, and for in vivo and ex vivo gene therapy procedures (See, e.g., West et al., Virology 160:38-47 (1987); U.S. Pat. No. 4,797,368; WO 93/24641; Kotin, Human Gene Therapy 5:793-801 (1994); Muzyczka, J. Clin. Invest. 94:1351 (1994). The construction of recombinant AAV vectors is described in a number of publications, including U.S. Pat. No. 5,173,414; Tratschin et al., Mol. Cell. Biol. 5:3251-3260 (1985); Tratschin, et al., Mol. Cell. Biol. 4:2072-2081 (1984); Hermonat & Muzyczka, PNAS 81:6466-6470 (1984); and Samulski et al., J. Virol. 63:03822-3828 (1989).

[0695] A base editor described herein can therefore be delivered with viral vectors. One or more components of the base editor system can be encoded on one or more viral vectors. For example, a base editor and guide nucleic acid can be encoded on a single viral vector. In other cases, the base editor and guide nucleic acid are encoded on different viral vectors. In either case, the base editor and guide nucleic acid can each be operably linked to a promoter and terminator.

[0696] The combination of components encoded on a viral vector can be determined by the cargo size constraints of the chosen viral vector.

### Non-Viral Delivery of Base Editors

[0697] Non-viral delivery approaches for base editors are also available. One important category of non-viral nucleic acid vectors are nanoparticles, which can be organic or inorganic. Nanoparticles are well known in the art. Any suitable nanoparticle design can be used to deliver genome editing system components or nucleic acids encoding such components. For instance, organic (e.g. lipid and/or polymer) nanoparticles can be suitable for use as delivery vehicles in certain embodiments of this disclosure. Exemplary lipids for use in nanoparticle formulations, and/or gene transfer are shown in Table 14 (below).

TABLE 14
Lipids Used for Gene Transfer

| Lipid | Abbreviation | Feature |
|---|---|---|
| 1,2-Dioleoyl-sn-glycero-3-phosphatidylcholine | DOPC | Helper |
| 1,2-Dioleoyl-sn-glycero-3-phosphatidylethanolamine | DOPE | Helper |
| Cholesterol | | Helper |
| N-[1-(2,3-Dioleyloxy)prophyl]N,N,N-trimethylammonium chloride | DOTMA | Cationic |
| 1,2-Dioleoyloxy-3-trimethylammonium-propane | DOTAP | Cationic |
| Dioctadecylamidoglycylspermine | DOGS | Cationic |
| N-(3-Aminopropyl)-N,N-dimethyl-2,3-bis(dodecyloxy)-1- | GAP-DLRIE | Cationic |
| propanaminium bromide | | |
| Cetyltrimethylammonium bromide | CTAB | Cationic |
| 6-Lauroxyhexyl omithinate | LHON | Cationic |
| 1-(2,3-Dioleoyloxypropyl)-2,4,6-trimethylpyridinium | 2Oc | Cationic |
| 2,3-Dioleyloxy-N-[2(sperminecarboxamido-ethyl]-N,N- | DOSPA | Cationic |
| dimethyl-1-propanaminium trifluoroacetate | | |
| 1,2-Dioleyl-3-trimethylammonium-propane | DOPA | Cationic |
| N-(2-Hydroxyethyl)-N,N-dimethyl-2,3-bis(tetradecyloxy)-1- | MDRIE | Cationic |
| propanaminium bromide | | |
| Dimyristooxypropyl dimethyl hydroxyethyl ammonium bromide | DMRI | Cationic |
| 3β-[N-(N′,N′-Dimethylaminoethane)-carbamoyl]cholesterol | DC-Chol | Cationic |
| Bis-guanidium-tren-cholesterol | BGTC | Cationic |
| 1,3-Diodeoxy-2-(6-carboxy-spermyl)-propylamide | DOSPER | Cationic |
| Dimethyloctadecylammonium bromide | DDAB | Cationic |
| Dioctadecylamidoglicylspermidin | DSL | Cationic |
| rac-[(2,3-Dioctadecyloxypropyl)(2-hydroxyethyl)]- | CLIP-1 | Cationic |
| dimethylammonium chloride | | |
| rac-[2(2,3-Dihexadecyloxypropyl- | CLIP-6 | Cationic |
| oxymethyloxy)ethyl]trimethylammoniun bromide | | |
| Ethyldimyristoylphosphatidylcholine | EDMPC | Cationic |
| 1,2-Distearyloxy-N,N-dimethyl-3-aminopropane | DSDMA | Cationic |
| 1,2-Dimyristoyl-trimethylammonium propane | DMTAP | Cationic |
| O,O′-Dimyristyl-N-lysyl aspartate | DMKE | Cationic |
| 1,2-Distearoyl-sn-glycero-3-ethylpho sphocholine | DSEPC | Cationic |
| N-Palmitoyl D-erythro-sphingosyl carbamoyl-spermine | CCS | Cationic |
| N-t-Butyl-N0-tetradecyl-3-tetradecylaminopropionamidine | diC14-amidine | Cationic |
| Octadecenolyoxy[ethyl-2-heptadecenyl-3 hydroxyethyl] | DOTIM | Cationic |
| imidazolinium chloride | | |
| N1-Cholesteryloxycarbonyl-3,7-diazanonane-1,9-diamine | CDAN | Cationic |
| 2-(3-[Bis(3-amino-propyl)-amino]propylamino)-N- | RPR209120 | Cationic |
| ditetradecylcarbamoylme-ethyl-acetamide | | |
| 1,2-dilinoleyloxy-3-dimethylaminopropane | DLinDMA | Cationic |
| 2,2-dilinoleyl-4-dimethylaminoethyl-[1,3]-dioxolane | DLin-KC2-DMA | Cationic |
| dilinoleyl-methyl-4-dimethylaminobutyrate | DLin-MC3-DMA | Cationic |

Table 15 lists exemplary polymers for use in gene transfer and/or nanoparticle formulations.

TABLE 15
Polymers Used for Gene Transfer

| Polymer | Abbreviation |
|---|---|
| Poly(ethylene)glycol | PEG |
| Polyethylenimine | PEI |
| Dithiobis (succinimidylpropionate) | DSP |
| Dimethyl-3,3′-dithiobispropionimidate | DTBP |
| Poly(ethylene imine)biscarbamate | PEIC |
| Poly(L-lysine) | PLL |
| Histidine modified PLL | |
| Poly(N-vinylpyrrolidone) | PVP |
| Poly(propylenimine) | PPI |
| Poly(amidoamine) | PAMAM |
| Poly(amidoethylenimine) | SS-PAEI |
| Triethylenetetramine | TETA |
| Poly(β-aminoester) | |
| Poly(4-hydroxy-L-proline ester) | PHP |
| Poly(allylamine) | |
| Poly(α-[4-aminobutyl]-L-glycolic acid) | PAGA |
| Poly(D,L-lactic-co-glycolic acid) | PLGA |
| Poly(N-ethyl-4-vinylpyridinium bromide) | |
| Poly(phosphazene)s | PPZ |
| Poly(phosphoester)s | PPE |
| Poly(phosphoramidate)s | PPA |
| Poly(N-2-hydroxypropylmethacrylamide) | pHPMA |
| Poly (2-(dimethylamino)ethyl methacrylate) | pDMAEMA |
| Poly(2-aminoethyl propylene phosphate) | PPE-EA |
| Chitosan | |
| Galactosylated chitosan | |
| N-Dodacylated chitosan | |
| Histone | |
| Collagen | |
| Dextran-spermine | D-SPM |

Table 16 summarizes delivery methods for a polynucleotide encoding a fusion protein described herein.

TABLE 16

| | | Delivery into | | | Type of |
|---|---|---|---|---|---|
| | | Non-Dividing | Duration of | Genome | Molecule |
| Delivery | Vector/Mode | Cells | Expression | Integration | Delivered |
| Physical | (e.g., | YES | Transient | NO | Nucleic Acids |
| | electroporation, | | | | and Proteins |
| | particle gun, | | | | |
| | Calcium | | | | |
| | Phosphate | | | | |
| | transfection | | | | |
| Viral | Retrovirus | NO | Stable | YES | RNA |
| | Lentivirus | YES | Stable | YES/NO with | RNA |
| | | | | modification | |
| | Adenovirus | YES | Transient | NO | DNA |
| | Adeno- | YES | Stable | NO | DNA |
| | Associated | | | | |
| | Virus (AAV) | | | | |
| | Vaccinia Virus | YES | Very | NO | DNA |
| | | | Transient | | |
| | Herpes Simplex | YES | Stable | NO | DNA |
| | Virus | | | | |
| Non-Viral | Cationic | YES | Transient | Depends on | Nucleic Acids |
| | Liposomes | | | what is | and Proteins |
| | | | | delivered | |
| | Polymeric | YES | Transient | Depends on | Nucleic Acids |
| | Nanoparticles | | | what is | and Proteins |
| | | | | delivered | |
| Biological | Attenuated | YES | Transient | NO | Nucleic Acids |
| Non-Viral | Bacteria | | | | |
| Delivery | Engineered | YES | Transient | NO | Nucleic Acids |
| Vehicles | Bacteriophages | | | | |
| | Mammalian | YES | Transient | NO | Nucleic Acids |
| | Virus-like | | | | |
| | Particles | | | | |
| | Biological | YES | Transient | NO | Nucleic Acids |
| | liposomes: | | | | |
| | Erythrocyte | | | | |
| | Ghosts and | | | | |
| | Exosomes | | | | |

[0698] In another aspect, the delivery of genome editing system components or nucleic acids encoding such components, for example, a nucleic acid binding protein such as, for example, Cas9 or variants thereof, and a gRNA targeting a genomic nucleic acid sequence of interest, may be accomplished by delivering a ribonucleoprotein (RNP) to cells. The RNP comprises the nucleic acid binding protein, e.g., Cas9, in complex with the targeting gRNA. RNPs may be delivered to cells using known methods, such as electroporation, nucleofection, or cationic lipid-mediated methods, for example, as reported by Zuris, J. A. et al., 2015, Nat. Biotechnology, 33(1):73-80. RNPs are advantageous for use in CRISPR base editing systems, particularly for cells that are difficult to transfect, such as primary cells. In addition, RNPs can also alleviate difficulties that may occur with protein expression in cells, especially when eukaryotic promoters, e.g., CMV or EF1A, which may be used in CRISPR plasmids, are not well-expressed. Advantageously, the use of RNPs does not require the delivery of foreign DNA into cells. Moreover, because an RNP comprising a nucleic acid binding protein and gRNA complex is degraded over time, the use of RNPs has the potential to limit off-target effects. In a manner similar to that for plasmid based techniques, RNPs can be used to deliver binding protein (e.g., Cas9 variants) and to direct homology directed repair (HDR).

[0699] A promoter used to drive base editor coding nucleic acid molecule expression can include AAV ITR. This can be advantageous for eliminating the need for an additional promoter element, which can take up space in the vector. The additional space freed up can be used to drive the expression of additional elements, such as a guide nucleic acid or a selectable marker. ITR activity is relatively weak, so it can be used to reduce potential toxicity due to over expression of the chosen nuclease.

[0700] Any suitable promoter can be used to drive expression of the base editor and, where appropriate, the guide nucleic acid. For ubiquitous expression, promoters that can be used include CMV, CAG, CBh, PGK, SV40, Ferritin heavy or light chains, etc. For brain or other CNS cell expression, suitable promoters can include: SynapsinI for all neurons, CaMKIIalpha for excitatory neurons, GAD67 or GAD65 or VGAT for GABAergic neurons, etc. For liver cell expression, suitable promoters include the Albumin promoter. For lung cell expression, suitable promoters can include SP-B. For endothelial cells, suitable promoters can include ICAM. For hematopoietic cells suitable promoters can include IFNbeta or CD45. For Osteoblasts suitable promoters can include OG-2.

[0701] In some cases, a base editor of the present disclosure is of small enough size to allow separate promoters to drive expression of the base editor and a compatible guide nucleic acid within the same nucleic acid molecule. For instance, a vector or viral vector can comprise a first promoter operably linked to a nucleic acid encoding the base editor and a second promoter operably linked to the guide nucleic acid.

[0702] The promoter used to drive expression of a guide nucleic acid can include: Pol III promoters such as U6 or H1 Use of Pol II promoter and intronic cassettes to express gRNA Adeno Associated Virus (AAV).

[0703] A base editor described herein with or without one or more guide nucleic can be delivered using adeno associated virus (AAV), lentivirus, adenovirus or other plasmid or viral vector types, in particular, using formulations and doses from, for example, U.S. Pat. No. 8,454,972 (formulations, doses for adenovirus), U.S. Pat. No. 8,404,658 (formulations, doses for AAV) and U.S. Pat. No. 5,846,946 (formulations, doses for DNA plasmids) and from clinical trials and publications regarding the clinical trials involving lentivirus, AAV and adenovirus. For example, for AAV, the route of administration, formulation and dose can be as in U.S. Pat. No. 8,454,972 and as in clinical trials involving AAV. For Adenovirus, the route of administration, formulation and dose can be as in U.S. Pat. No. 8,404,658 and as in clinical trials involving adenovirus. For plasmid delivery, the route of administration, formulation and dose can be as in U.S. Pat. No. 5,846,946 and as in clinical studies involving plasmids. Doses can be based on or extrapolated to an average 70 kg individual (e.g. a male adult human), and can be adjusted for patients, subjects, mammals of different weight and species. Frequency of administration is within the ambit of the medical or veterinary practitioner (e.g., physician, veterinarian), depending on usual factors including the age, sex, general health, other conditions of the patient or subject and the particular condition or symptoms being addressed. The viral vectors can be injected into the tissue of interest. For cell-type specific base editing, the expression of the base editor and optional guide nucleic acid can be driven by a cell-type specific promoter.

[0704] For in vivo delivery, AAV can be advantageous over other viral vectors. In some cases, AAV allows low toxicity, which can be due to the purification method not requiring ultra-centrifugation of cell particles that can activate the immune response. In some cases, AAV allows low probability of causing insertional mutagenesis because it doesn't integrate into the host genome.

[0705] AAV has a packaging limit of 4.5 or 4.75 Kb. This means disclosed base editor as well as a promoter and transcription terminator can fit into a single viral vector. Constructs larger than 4.5 or 4.75 Kb can lead to significantly reduced virus production. For example, SpCas9 is quite large, the gene itself is over 4.1 Kb, which makes it difficult for packing into AAV. Therefore, embodiments of the present disclosure include utilizing a disclosed base editor which is shorter in length than conventional base editors. In some examples, the base editors are less than 4 kb. Disclosed base editors can be less than 4.5 kb, 4.4 kb, 4.3 kb, 4.2 kb, 4.1 kb, 4 kb, 3.9 kb, 3.8 kb, 3.7 kb, 3.6 kb, 3.5 kb, 3.4 kb, 3.3 kb, 3.2 kb, 3.1 kb, 3 kb, 2.9 kb, 2.8 kb, 2.7 kb, 2.6 kb, 2.5 kb, 2 kb, or 1.5 kb. In some cases, the disclosed base editors are 4.5 kb or less in length.

[0706] An AAV can be AAV1, AAV2, AAV5 or any combination thereof. One can select the type of AAV with regard to the cells to be targeted; e.g., one can select AAV serotypes 1, 2, 5 or a hybrid capsid AAV1, AAV2, AAV5 or any combination thereof for targeting brain or neuronal cells; and one can select AAV4 for targeting cardiac tissue. AAV8 is useful for delivery to the liver. A tabulation of certain AAV serotypes as to these cells can be found in Grimm, D. et al, J. Virol. 82: 5887-5911 (2008)).

[0707] Lentiviruses are complex retroviruses that have the ability to infect and express their genes in both mitotic and post-mitotic cells. The most commonly known lentivirus is the human immunodeficiency virus (HIV), which uses the envelope glycoproteins of other viruses to target a broad range of cell types.

[0708] Lentiviruses can be prepared as follows. After cloning pCasES10 (which contains a lentiviral transfer plasmid backbone), HEK293FT at low passage (p=5) were seeded in a T-75 flask to 50% confluence the day before transfection in DMEM with 10% fetal bovine serum and without antibiotics. After 20 hours, media is changed to OptiMEM (serum-free) media and transfection was done 4 hours later. Cells are transfected with 10 μg of lentiviral transfer plasmid (pCasES10) and the following packaging plasmids: 5 μg of pMD2.G (VSV-g pseudotype), and 7.5 μg of psPAX2 (gag/pol/rev/tat). Transfection can be done in 4 mL OptiMEM with a cationic lipid delivery agent (50 μl Lipofectamine 2000 and 100 ul Plus reagent). After 6 hours, the media is changed to antibiotic-free DMEM with 10% fetal bovine serum. These methods use serum during cell culture, but serum-free methods are preferred.

[0709] Lentivirus can be purified as follows. Viral supernatants are harvested after 48 hours. Supernatants are first cleared of debris and filtered through a 0.45 μm low protein binding (PVDF) filter. They are then spun in an ultracentrifuge for 2 hours at 24,000 rpm. Viral pellets are resuspended in 50 μl of DMEM overnight at 4° C. They are then aliquoted and immediately frozen at −80° C.

[0710] In another embodiment, minimal non-primate lentiviral vectors based on the equine infectious anemia virus (EIAV) are also contemplated. In another embodiment, RETINOSTAT®, an equine infectious anemia virus-based lentiviral gene therapy vector that expresses angiostatic proteins endostatin and angiostatin that is contemplated to be delivered via a subretinal injection. In another embodiment, use of self-inactivating lentiviral vectors is contemplated.

[0711] Any RNA of the systems, for example a guide RNA or a base editor-encoding mRNA, can be delivered in the form of RNA. Base editor-encoding mRNA can be generated using in vitro transcription. For example, nuclease mRNA can be synthesized using a PCR cassette containing the following elements: T7 promoter, optional kozak sequence (GCCACC), nuclease sequence, and 3′ UTR such as a 3′ UTR from beta globin-polyA tail. The cassette can be used for transcription by T7 polymerase. Guide polynucleotides (e.g., gRNA) can also be transcribed using in vitro transcription from a cassette containing a T7 promoter, followed by the sequence “GG”, and guide polynucleotide sequence.

[0712] To enhance expression and reduce possible toxicity, the base editor-coding sequence and/or the guide nucleic acid can be modified to include one or more modified nucleoside e.g. using pseudo-U or 5-Methyl-C.

[0713] The disclosure in some embodiments comprehends a method of modifying a cell or organism. The cell can be a prokaryotic cell or a eukaryotic cell. The cell can be a mammalian cell. The mammalian cell many be a non-human primate, bovine, porcine, rodent or mouse cell. The modification introduced to the cell by the base editors, compositions and methods of the present disclosure can be such that the cell and progeny of the cell are altered for improved production of biologic products such as an antibody, starch, alcohol or other desired cellular output. The modification introduced to the cell by the methods of the present disclosure can be such that the cell and progeny of the cell include an alteration that changes the biologic product produced.

[0714] The system can comprise one or more different vectors. In an aspect, the base editor is codon optimized for expression the desired cell type, preferentially a eukaryotic cell, preferably a mammalian cell or a human cell.

[0715] In general, codon optimization refers to a process of modifying a nucleic acid sequence for enhanced expression in the host cells of interest by replacing at least one codon (e.g. about or more than about 1, 2, 3, 4, 5, 10, 15, 20, 25, 50, or more codons) of the native sequence with codons that are more frequently or most frequently used in the genes of that host cell while maintaining the native amino acid sequence. Various species exhibit particular bias for certain codons of a particular amino acid. Codon bias (differences in codon usage between organisms) often correlates with the efficiency of translation of messenger RNA (mRNA), which is in turn believed to be dependent on, among other things, the properties of the codons being translated and the availability of particular transfer RNA (tRNA) molecules. The predominance of selected tRNAs in a cell is generally a reflection of the codons used most frequently in peptide synthesis. Accordingly, genes can be tailored for optimal gene expression in a given organism based on codon optimization. Codon usage tables are readily available, for example, at the “Codon Usage Database” available at www.kazusa.orjp/codon/ (visited Jul. 9, 2002), and these tables can be adapted in a number of ways. See, Nakamura, Y., et al. “Codon usage tabulated from the international DNA sequence databases: status for the year 2000” Nucl. Acids Res. 28:292 (2000). Computer algorithms for codon optimizing a particular sequence for expression in a particular host cell are also available, such as Gene Forge (Aptagen; Jacobus, Pa.), are also available. In some embodiments, one or more codons (e.g. 1, 2, 3, 4, 5, 10, 15, 20, 25, 50, or more, or all codons) in a sequence encoding an engineered nuclease correspond to the most frequently used codon for a particular amino acid.

[0716] Packaging cells are typically used to form virus particles that are capable of infecting a host cell. Such cells include 293 cells, which package adenovirus, and psi.2 cells or PA317 cells, which package retrovirus. Viral vectors used in gene therapy are usually generated by producing a cell line that packages a nucleic acid vector into a viral particle. The vectors typically contain the minimal viral sequences required for packaging and subsequent integration into a host, other viral sequences being replaced by an expression cassette for the polynucleotide(s) to be expressed. The missing viral functions are typically supplied in trans by the packaging cell line. For example, AAV vectors used in gene therapy typically only possess ITR sequences from the AAV genome which are required for packaging and integration into the host genome. Viral DNA can be packaged in a cell line, which contains a helper plasmid encoding the other AAV genes, namely rep and cap, but lacking ITR sequences. The cell line can also be infected with adenovirus as a helper. The helper virus can promote replication of the AAV vector and expression of AAV genes from the helper plasmid. The helper plasmid in some cases is not packaged in significant amounts due to a lack of ITR sequences. Contamination with adenovirus can be reduced by, e.g., heat treatment to which adenovirus is more sensitive than AAV.

### Inteins

[0717] In some embodiments, a portion or fragment of a nuclease (e.g., Cas9) is fused to an intein. The nuclease can be fused to the N-terminus or the C-terminus of the intein. In some embodiments, a portion or fragment of a fusion protein is fused to an intein and fused to an AAV capsid protein. The intein, nuclease and capsid protein can be fused together in any arrangement (e.g., nuclease-intein-capsid, intein-nuclease-capsid, capsid-intein-nuclease, etc.). In some embodiments, the N-terminus of an intein is fused to the C-terminus of a fusion protein and the C-terminus of the intein is fused to the N-terminus of an AAV capsid protein.

[0718] Inteins (intervening protein) are auto-processing domains found in a variety of diverse organisms, which carry out a process known as protein splicing. Protein splicing is a multi-step biochemical reaction comprised of both the cleavage and formation of peptide bonds. While the endogenous substrates of protein splicing are proteins found in intein-containing organisms, inteins can also be used to chemically manipulate virtually any polypeptide backbone.

[0719] In protein splicing, the intein excises itself out of a precursor polypeptide by cleaving two peptide bonds, thereby ligating the flanking extein (external protein) sequences via the formation of a new peptide bond. This rearrangement occurs post-translationally (or possibly co-translationally). Intein-mediated protein splicing occurs spontaneously, requiring only the folding of the intein domain.

[0720] About 5% of inteins are split inteins, which are transcribed and translated as two separate polypeptides, the N-intein and C-intein, each fused to one extein. Upon translation, the intein fragments spontaneously and non-covalently assemble into the canonical intein structure to carry out protein splicing in trans. The mechanism of protein splicing entails a series of acyl-transfer reactions that result in the cleavage of two peptide bonds at the intein-extein junctions and the formation of a new peptide bond between the N- and C-exteins. This process is initiated by activation of the peptide bond joining the N-extein and the N-terminus of the intein. Virtually all inteins have a cysteine or serine at their N-terminus that attacks the carbonyl carbon of the C-terminal N-extein residue. This N to O/S acyl-shift is facilitated by a conserved threonine and histidine (referred to as the TXXH motif), along with a commonly found aspartate, which results in the formation of a linear (thio)ester intermediate. Next, this intermediate is subject to trans-(thio)esterification by nucleophilic attack of the first C-extein residue (+1), which is a cysteine, serine, or threonine. The resulting branched (thio)ester intermediate is resolved through a unique transformation: cyclization of the highly conserved C-terminal asparagine of the intein. This process is facilitated by the histidine (found in a highly conserved HNF motif) and the penultimate histidine and may also involve the aspartate. This succinimide formation reaction excises the intein from the reactive complex and leaves behind the exteins attached through a non-peptidic linkage. This structure rapidly rearranges into a stable peptide bond in an intein-independent fashion.

[0721] In some embodiments, an N-terminal fragment of a base editor (e.g., ABE, CBE) is fused to a split intein-N and a C-terminal fragment is fused to a split intein-C. These fragments are then packaged into two or more AAV vectors. The use of certain inteins for joining heterologous protein fragments is described, for example, in Wood et al., J. Biol. Chem. 289(21); 14512-9 (2014). For example, when fused to separate protein fragments, the inteins IntN and IntC recognize each other, splice themselves out and simultaneously ligate the flanking N- and C-terminal exteins of the protein fragments to which they were fused, thereby reconstituting a full-length protein from the two protein fragments. Other suitable inteins will be apparent to a person of skill in the art.

[0722] In some embodiments, an ABE was split into N- and C-terminal fragments at Ala, Ser, Thr, or Cys residues within selected regions of SpCas9. These regions correspond to loop regions identified by Cas9 crystal structure analysis. The N-terminus of each fragment is fused to an intein-N and the C-terminus of each fragment is fused to an intein C at amino acid positions S303, T310, T313, S355, A456, S460, A463, T466, S469, T472, T474, C574, S577, A589, and S590, which are indicated in bold capital letters in the sequence below.

| | |
|---|---|
| 1 | mdkkysigld igtnsvgwav itdeykvpsk kfkvigntdr hsikknliga llfdsgetae |
| 61 | atrlkrtarr rytrrknric ylqeifsnem akvddsffhr leesfiveed kkherhpifg |
| 121 | nivdevayhe kyptiyhlrk klvdstdkad irliylalah mikfrghfli egdinpdnsd |
| 181 | vdklfiqlvq tynqlfeenp inasgvdaka ilsarlsksr rlenliaqlp gekknglfgn |
| 241 | lialslgltp nfksnfdlae daklqlskdt ydddldnlla qigdqyadlf laaknlsdai |
| 301 | llSdilrvnTeiTkaplsas mikrydehhq dltllkalvr qqlpekykei ffdqSkngya |
| 361 | gyidggasqe efykfikpil ekmdgteell vklnredllr kqrtfdngsi phqihlgelh |
| 421 | ailrrqedfy pfikdnreki ekiltfripy yvgplArgnS rfAwmTrkSe eTiTpwnfee |
| 481 | vvdkgasaqs fiermtnfdk nlpnekvlpk hsilyeyftv yneltkvkyv tegmrkpafl |
| 541 | sgeqkkaivd llfktnrkvt vkqlkedyfk kieCfdSvei sgvedrfnAS igtyhdllki |
| 601 | ikdkdfidne enedilediv itltlfedre mieerlktya hifddkvmkq Ikrrrytgwg |
| 661 | risrklingi rdkqsgktil dflksdgfan rnfmqlihdd sltfkediqk aqvsgqgdsl |
| 721 | hehianlags paikkgilqt vkvvdelvkv mgrhkpeniv iemarenqtt qkgqknsrer |
| 781 | mkrieegike igsqilkehp ventqlqnek lylyylqngr dmyvdqeldi nrlsdydvdh |
| 841 | ivpqsfikdd sidnkvltrs dknrgksdnv pseevvkkmk nywrqllnak litqrkfdni |
| 901 | tkaergglse Idkagfikrq ivetrqitkh vaqildsrmn tkydendkli revkvitlks |
| 961 | klvsdfrkdf qfykvreinn yhhahdayin avvgtalikk ypklesefvy gdykvydvrk |
| 1021 | miakseqeig katakyffys nimnffktei tlangeirkr plietngetg eivwdkgrdf |
| 1081 | atvrkvlsmp qvnivkktev qtggfskesi ipkrnsdkli arkkdwdpkk yggfdsptva |
| 1141 | ysvlvvakve kgkskklksv kellgitime rssfeknpid fleakgykev kkdliiklpk |
| 1201 | ysifelengr krmlasagel qkgnelalps kyvnflylas hyeklkgspe dneqkqlfve |
| 1261 | qhkhyldeii eqisefskrv iladanldkv isaynkhrdk pireqaenii hlftltnlga |
| 1321 | paafkyfdtt idrkrytstk evldatlihq sitglyetri dlsqlggd |

### Pharmaceutical Compositions

[0723] Other aspects of the present disclosure relate to pharmaceutical compositions comprising any of the base editors, fusion proteins, the fusion protein-guide polynucleotide complexes, or the edited cells described herein. The term “pharmaceutical composition”, as used herein, refers to a composition formulated for pharmaceutical use. In some embodiments, the pharmaceutical composition further comprises a pharmaceutically acceptable carrier. In some embodiments, the pharmaceutical composition comprises additional agents (e.g., for specific delivery, increasing half-life, or other therapeutic compounds).

[0724] As used here, the term “pharmaceutically-acceptable carrier” means a pharmaceutically-acceptable material, composition or vehicle, such as a liquid or solid filler, diluent, excipient, manufacturing aid (e.g., lubricant, talc magnesium, calcium or zinc stearate, or steric acid), or solvent encapsulating material, involved in carrying or transporting the compound from one site (e.g., the delivery site) of the body, to another site (e.g., organ, tissue or portion of the body). A pharmaceutically acceptable carrier is “acceptable” in the sense of being compatible with the other ingredients of the formulation and not injurious to the tissue of the subject (e.g., physiologically compatible, sterile, physiologic pH, etc.).

[0725] Some nonlimiting examples of materials which can serve as pharmaceutically-acceptable carriers include: (1) sugars, such as lactose, glucose and sucrose; (2) starches, such as corn starch and potato starch; (3) cellulose, and its derivatives, such as sodium carboxymethyl cellulose, methylcellulose, ethyl cellulose, microcrystalline cellulose and cellulose acetate; (4) powdered tragacanth; (5) malt; (6) gelatin; (7) lubricating agents, such as magnesium stearate, sodium lauryl sulfate and talc; (8) excipients, such as cocoa butter and suppository waxes; (9) oils, such as peanut oil, cottonseed oil, safflower oil, sesame oil, olive oil, corn oil and soybean oil; (10) glycols, such as propylene glycol; (11) polyols, such as glycerin, sorbitol, mannitol and polyethylene glycol (PEG); (12) esters, such as ethyl oleate and ethyl laurate; (13) agar; (14) buffering agents, such as magnesium hydroxide and aluminum hydroxide; (15) alginic acid; (16) pyrogen-free water; (17) isotonic saline; (18) Ringer's solution; (19) ethyl alcohol; (20) pH buffered solutions; (21) polyesters, polycarbonates and/or polyanhydrides; (22) bulking agents, such as polypeptides and amino acids (23) serum alcohols, such as ethanol; and (23) other non-toxic compatible substances employed in pharmaceutical formulations. Wetting agents, coloring agents, release agents, coating agents, sweetening agents, flavoring agents, perfuming agents, preservative and antioxidants can also be present in the formulation. The terms such as “excipient,” “carrier,” “pharmaceutically acceptable carrier,” “vehicle,” or the like are used interchangeably herein.

[0726] Pharmaceutical compositions can comprise one or more pH buffering compounds to maintain the pH of the formulation at a predetermined level that reflects physiological pH, such as in the range of about 5.0 to about 8.0. The pH buffering compound used in the aqueous liquid formulation can be an amino acid or mixture of amino acids, such as histidine or a mixture of amino acids such as histidine and glycine. Alternatively, the pH buffering compound is preferably an agent which maintains the pH of the formulation at a predetermined level, such as in the range of about 5.0 to about 8.0, and which does not chelate calcium ions. Illustrative examples of such pH buffering compounds include, but are not limited to, imidazole and acetate ions. The pH buffering compound may be present in any amount suitable to maintain the pH of the formulation at a predetermined level.

[0727] Pharmaceutical compositions can also contain one or more osmotic modulating agents, i.e., a compound that modulates the osmotic properties (e.g, tonicity, osmolality, and/or osmotic pressure) of the formulation to a level that is acceptable to the blood stream and blood cells of recipient individuals. The osmotic modulating agent can be an agent that does not chelate calcium ions. The osmotic modulating agent can be any compound known or available to those skilled in the art that modulates the osmotic properties of the formulation. One skilled in the art may empirically determine the suitability of a given osmotic modulating agent for use in the inventive formulation. Illustrative examples of suitable types of osmotic modulating agents include, but are not limited to: salts, such as sodium chloride and sodium acetate; sugars, such as sucrose, dextrose, and mannitol; amino acids, such as glycine; and mixtures of one or more of these agents and/or types of agents. The osmotic modulating agent(s) may be present in any concentration sufficient to modulate the osmotic properties of the formulation.

[0728] In some embodiments, the pharmaceutical composition is formulated for delivery to a subject, e.g., for gene editing. Suitable routes of administrating the pharmaceutical composition described herein include, without limitation: topical, subcutaneous, transdermal, intradermal, intralesional, intraarticular, intraperitoneal, intravesical, transmucosal, gingival, intradental, intracochlear, transtympanic, intraorgan, epidural, intrathecal, intramuscular, intravenous, intravascular, intraosseus, periocular, intratumoral, intracerebral, and intracerebroventricular administration.

[0729] In some embodiments, the pharmaceutical composition described herein is administered locally to a diseased site (e.g., tumor site). In some embodiments, the pharmaceutical composition described herein is administered to a subject by injection, by means of a catheter, by means of a suppository, or by means of an implant, the implant being of a porous, non-porous, or gelatinous material, including a membrane, such as a sialastic membrane, or a fiber.

[0730] In other embodiments, the pharmaceutical composition described herein is delivered in a controlled release system. In one embodiment, a pump can be used (See, e.g., Langer, 1990, Science 249:1527-1533; Sefton, 1989, CRC Crit. Ref. Biomed. Eng. 14:201; Buchwald et al., 1980, Surgery 88:507; Saudek et al., 1989, N. Engl. J. Med. 321:574). In another embodiment, polymeric materials can be used. (See, e.g., Medical Applications of Controlled Release (Langer and Wise eds., CRC Press, Boca Raton, Fla., 1974); Controlled Drug Bioavailability, Drug Product Design and Performance (Smolen and Ball eds., Wiley, New York, 1984); Ranger and Peppas, 1983, Macromol. Sci. Rev. Macromol. Chem. 23:61. See also Levy et al., 1985, Science 228:190; During et al., 1989, Ann. Neurol. 25:351; Howard et ah, 1989, J. Neurosurg. 71:105.) Other controlled release systems are discussed, for example, in Langer, supra.

[0731] In some embodiments, the pharmaceutical composition is formulated in accordance with routine procedures as a composition adapted for intravenous or subcutaneous administration to a subject, e.g., a human. In some embodiments, pharmaceutical composition for administration by injection are solutions in sterile isotonic use as solubilizing agent and a local anesthetic such as lignocaine to ease pain at the site of the injection. Generally, the ingredients are supplied either separately or mixed together in unit dosage form, for example, as a dry lyophilized powder or water free concentrate in a hermetically sealed container such as an ampoule or sachette indicating the quantity of active agent. Where the pharmaceutical is to be administered by infusion, it can be dispensed with an infusion bottle containing sterile pharmaceutical grade water or saline. Where the pharmaceutical composition is administered by injection, an ampoule of sterile water for injection or saline can be provided so that the ingredients can be mixed prior to administration.

[0732] A pharmaceutical composition for systemic administration can be a liquid, e.g., sterile saline, lactated Ringer's or Hank's solution. In addition, the pharmaceutical composition can be in solid forms and re-dissolved or suspended immediately prior to use. Lyophilized forms are also contemplated. The pharmaceutical composition can be contained within a lipid particle or vesicle, such as a liposome or microcrystal, which is also suitable for parenteral administration. The particles can be of any suitable structure, such as unilamellar or plurilamellar, so long as compositions are contained therein. Compounds can be entrapped in “stabilized plasmid-lipid particles” (SPLP) containing the fusogenic lipid dioleoylphosphatidylethanolamine (DOPE), low levels (5-10 mol %) of cationic lipid, and stabilized by a polyethyleneglycol (PEG) coating (Zhang Y. P. et ah, Gene Ther. 1999, 6: 1438-47). Positively charged lipids such as N41-(2,3-dioleoyloxi)propyll-N,N,N-trimethyl-amoniummethylsulfate, or “DOTAP,” are particularly preferred for such particles and vesicles. The preparation of such lipid particles is well known. See, e.g., U.S. Pat. Nos. 4,880,635; 4,906,477; 4,911,928; 4,917,951; 4,920,016; and 4,921,757; each of which is incorporated herein by reference.

[0733] The pharmaceutical composition described herein can be administered or packaged as a unit dose, for example. The term “unit dose” when used in reference to a pharmaceutical composition of the present disclosure refers to physically discrete units suitable as unitary dosage for the subject, each unit containing a predetermined quantity of active material calculated to produce the desired therapeutic effect in association with the required diluent; i.e., carrier, or vehicle.

[0734] Further, the pharmaceutical composition can be provided as a pharmaceutical kit comprising (a) a container containing a compound of the invention in lyophilized form and (b) a second container containing a pharmaceutically acceptable diluent (e.g., sterile used for reconstitution or dilution of the lyophilized compound of the invention. Optionally associated with such container(s) can be a notice in the form prescribed by a governmental agency regulating the manufacture, use or sale of pharmaceuticals or biological products, which notice reflects approval by the agency of manufacture, use or sale for human administration.

[0735] In another aspect, an article of manufacture containing materials useful for the treatment of the diseases described above is included. In some embodiments, the article of manufacture comprises a container and a label. Suitable containers include, for example, bottles, vials, syringes, and test tubes. The containers can be formed from a variety of materials such as glass or plastic. In some embodiments, the container holds a composition that is effective for treating a disease described herein and can have a sterile access port. For example, the container can be an intravenous solution bag or a vial having a stopper pierceable by a hypodermic injection needle. The active agent in the composition is a compound of the invention. In some embodiments, the label on or associated with the container indicates that the composition is used for treating the disease of choice. The article of manufacture can further comprise a second container comprising a pharmaceutically-acceptable buffer, such as phosphate-buffered saline, Ringer's solution, or dextrose solution. It can further include other materials desirable from a commercial and user standpoint, including other buffers, diluents, filters, needles, syringes, and package inserts with instructions for use.

[0736] In some embodiments, any of the fusion proteins, gRNAs, complexes and/or cells described herein are provided as part of a pharmaceutical composition. In some embodiments, the pharmaceutical composition comprises any of the fusion proteins provided herein. In some embodiments, the pharmaceutical composition comprises any of the complexes provided herein. In some embodiments, the pharmaceutical composition comprises a ribonucleoprotein complex comprising an RNA-guided nuclease (e.g., Cas9) that forms a complex with a gRNA and a cationic lipid. In some embodiments, the pharmaceutical composition comprises a gRNA, a nucleic acid programmable DNA binding protein, a cationic lipid, and a pharmaceutically acceptable excipient. In some embodiments, the pharmaceutical composition comprises any of the edited cells as provided herein. Pharmaceutical compositions can optionally comprise one or more additional therapeutically active substances.

### Kits

[0737] Various aspects of this disclosure provide kits comprising a base editor system. In one embodiment, the kit comprises a nucleic acid construct comprising a nucleotide sequence encoding a nucleobase editor fusion protein. The fusion protein comprises a deaminase (e.g., cytidine deaminase or adenine deaminase) and a nucleic acid programmable DNA binding protein (napDNAbp). In some embodiments, the kit comprises at least one guide RNA capable of targeting a nucleic acid molecule of interest. In some embodiments, the kit comprises a nucleic acid construct comprising a nucleotide sequence encoding at least one guide RNA. In some embodiments, the kit comprises any of the edited cells as provided herein. In some embodiments, the kit comprises any of the pharmaceutical compositions as provided herein.

[0738] The kit provides, in some embodiments, instructions for using the kit to edit one or more mutations. The instructions will generally include information about the use of the kit for editing nucleic acid molecules. In other embodiments, the instructions include at least one of the following: precautions; warnings; clinical studies; and/or references. The instructions may be printed directly on the container (when present), or as a label applied to the container, or as a separate sheet, pamphlet, card, or folder supplied in or with the container. In a further embodiment, a kit can comprise instructions in the form of a label or separate insert (package insert) for suitable operational parameters. In yet another embodiment, the kit can comprise one or more containers with appropriate positive and negative controls or control samples, to be used as standard(s) for detection, calibration, or normalization. The kit can further comprise a second container comprising a pharmaceutically-acceptable buffer, such as (sterile) phosphate-buffered saline, Ringer's solution, or dextrose solution. It can further include other materials desirable from a commercial and user standpoint, including other buffers, diluents, filters, needles, syringes, and package inserts with instructions for use.

[0739] In certain embodiments, the kit is useful for conditioning a subject for transplantation or engraftment.

### EXAMPLES

[0740] The following examples are provided for illustrative purposes only and are not intended to limit the scope of the claims provided herein.

### Example 1. PAM Variant Validation in Base Editors

[0741] To evaluate a novel method for conditioning, a base editing strategy was developed that targets the cell surface protein CD117/cKIT to create at least one amino acid substitution that alters an epitope binding domain, thereby preventing an anti-CD117 antibody from binding the edited cells without altering SCF binding or activity. Typical antibodies used for conditioning include AMG 191 and SR1, which may also be used in methods of the invention (FIG. 1). AMG 191 and SR1 are also known to deplete human hematopoietic stem and progenitor cells and myelodysplastic syndromes cells in vivo (FIG. 2).

[0742] The conditioning methods described here provides for the post-HSCT use of anti-CD117 therapies, which cannot bind and deplete the edited cells, and thus could be used to expand gene edited cells in vivo, or allow for cancer treatment without hematopoietic toxicity. CD117 is altered (e.g., using base editing) in a cell for transplantation to prevent binding of anti-CD117 antibody (AMG 191; SR1). This alteration does not interfere with normal SCF signaling (FIG. 3). Using base editing, a nucleobase change is generated to create an amino acid substitution in CD117. Stem cell factor (SCF) drives HSC self-renewal and differentiation into progenitor cells (FIG. 3, at 1). Administering anti-CD117 antibody blocks SCF binding to CD117, thereby depleting HSCs and progenitor cells in the patient (conditioning) (FIG. 3, at 2). Autologous gene edited HSCs are transplanted into the patient (FIG. 3, at 3). Gene-edited cells compete with residual host HSCs to repopulate bone marrow (BM) (FIG. 3, at 4). Anti-CD117 antibody blocks SCF binding to wildtype (WT) CD117, but cannot bind to HSCs with an edited CD117. Native, wild-type HSCs are targeted by anti-CD117 antibody, but gene edited HSCs are not (FIG. 3, at 5). Thus, both wild-type and edited HSC cells express CD117 polypeptides that are activated by SCF binding (FIG. 4). However, binding of anti-CD117 antibody to wild-type CD117 disrupts SCF binding and results in inhibition of SCF signaling in wild-type cells (FIG. 5). In contrast, gene-edited HSCs are refractory to anti-CD117 antibody because the amino acid substitution introduced in CD117 prevents the binding of anti-CD117 antibody, but does not interfere with normal SCF binding and signaling.

### Example 2. CD117/C-Kit Guide Screen

[0743] A screen was conducted to identify guide RNAs that introduce alterations in a CD117 polypeptide without altering SCF binding to CD117 or CD117 biological activity.

[0744] First, 189 guides capable of introducing a mutation in CD117 were screened in HEK293T cells. Guide numbers were assigned to each guide (see Table 23). Guide numbers 1-132 were used with an ABE8.8 base editor and guide numbers 133-189 were used with an IBE-NGC base editor (internal Cas9 deaminase fusion with NGC PAM). A guide for Hereditary Persistence of Fetal Hemoglobin (HPFH) was used as a positive control for the ABE8.8 editor, and a guide for Makassar-WT was used as a positive control for the IBE-NGC editor (Maxcyte oc-25, 0.3 M, 50 nM editor and 10 μM guide).

[0745] The Makassar-WT guide nucleic acid sequence is as follows: ACUUCUCCUCAGGAGUCAGGUGC. The Makassar-WT guide hybridizes to the complement of the following target sequence: ACTTCTCCTCAGGAGTCAGGTGC.

[0746] The HPFH guide nucleic acid sequence is as follows: CUUGACCAAUAGCCUUGACA. The HPFH guide hybridizes to the complement of the following target sequence:

CTTGACCAATAGCCTTGACA.

[0747] FIG. 6 shows the base editing efficiencies at different nucleotide positions at the target site for either the Makassar-WT guide (top) or the HPFH guide (bottom).

[0748] From the 189 guides, 31 guides were selected for ABE8.8 (HPFH) and 14 guides were selected for IBE-NGC (Makassar) based on-target editing efficiency. As shown in Table 17, five (5) guides, cc119, cc103, cc128, cc131, and cc80, used with ABE8.8 showed greater than 80% base editing efficiency (Maxcyte oc-25, 0.3 M, 50 nM editor and 10 uM guide) (FIGS. 7A and 7B). Use of Guide cc103 resulted in a Y221C mutation, which is a naturally occurring mutation in CD117.

TABLE 17
Five (5) guides (ABE8.8) showed >80% editing efficiency

| Guide Number | Epitope Group | Mutation | Efficiency (%) | Mutation | Efficiency (%) |
|---|---|---|---|---|---|
| Guide-CC119 | 3-Other epitope | D45G | 87.19 | N/A | N/A |
| Guide-CC103 | 3-Other epitope | Y221C | 84.13 | S220G | 0.28 |
| Guide-CC128 | 4-Functionally | Y259C | 83.54 | N260V | 78.76 |
| | important | | | | |
| | residues | | | | |
| Guide-CC131 | 4-Functionally | K383G | 16.31 | N/A | N/A |
| | important | | | | |
| | residues | | | | |
| Guide-CC80 | 2-Dimer | K342G/R | 5.4 | N/A | N/A |
| | interfering | | | | |
| | epitope | | | | |

[0749] As shown in Table 18, eleven (11) guides, cc100, cc91, cc132, cc101, cc102, cc79, cc84, cc126, cc90, cc114 and cc93, used with ABE8.8 showed about 60% to 80% base editing efficiency (Maxcyte oc-25, 0.3 M, 50 nM editor and 10 uM guide) (FIGS. 8A and 8B). Guide cc102 resulted in a Y221C mutation, which is a naturally occurring mutation in CD117.

TABLE 18
Eleven (11) guides (ABE8.8) showed 60% to 80% editing efficiency

| Guide Number | Epitope Group | Mutation | Efficiency (%) | Mutation | Efficiency (%) |
|---|---|---|---|---|---|
| Guide-CC100 | 3-Other epitope | I163T | 19.84 | F162P/L | 3.98 |
| Guide-CC91 | 3-Other epitope | T461A | 75.79 | Q460R | 33.12 |
| Guide-CC132 | 4-Functionally | R381G | 22.52 | N/A | N/A |
| | important | | | | |
| | residues | | | | |
| Guide-CC101 | 3-Other epitope | L472P | 76.68 | V473A | 39.93 |
| Guide-CC102 | 3-Other epitope | Y221C | 70.14 | S220G | 7.21 |
| Guide-CC79 | 2-Dimer | M351T | 68.67 | Y350H | 7.48 |
| | interfering | | | | |
| | epitope | | | | |
| Guide-CC84 | 3-Other epitope | Q79R | 68.46 | N80G | 5.87 |
| Guide-CC126 | 4-Functionally | L124P | 67.84 | Y125H | 60.51 |
| | important | | | | |
| | residues | | | | |
| Guide-CC90 | 3-Other epitope | E81G/D | 66.2 | N80S | 1.01 |
| Guide-CC114 | 3-Other epitope | D45G | 65.51 | N/A | N/A |
| Guide-CC93 | 3-Other epitope | V195A | 64.67 | L196P | 0.4 |

[0750] As shown in Table 19, nine (9) guides, cc98, cc76, cc125, cc78, cc89, cc73, and cc110, cc72, and cc115, used with ABE8.8 showed about 40% to 60% base editing efficiency (Maxcyte oc-25, 0.3 M, 50 nM editor and 10 uM guide) (FIGS. 9A and 9B). Guide cc78 resulted in a D419G mutation, guide cc89 resulted in a T144A mutation, and guide cc110 resulted in a T322A, which are all naturally occurring mutations in CD117.

TABLE 19
Nine (9) guides (ABE8.8) showed 40% to 60% editing efficiency

| Guide Number | Epitope Group | Mutation | Efficiency (%) | Mutation | Efficiency (%) |
|---|---|---|---|---|---|
| Guide-CC98 | 3-Other epitope | F324L | 59.4 | V323A | 6.11 |
| Guide-CC76 | 2-Dimer | T354A | 39.04 | R353G | 1.37 |
| | interfering | | | | |
| | epitope | | | | |
| Guide-CC125 | 3-Other epitope | I163V | 56.44 | N/A | N/A |
| Guide-CC78 | 2-Dimer | Y418C | 52.25 | D419G | 10.86 |
| | interfering | | | | |
| | epitope | | | | |
| Guide-CC89 | 3-Other epitope | T144A | 50.26 | N145G/Y | 3.56 |
| Guide-CC73 | 1-SCF | N77G/Y | 50.23 | E76G/ | 20.25/3.25 |
| | interfering | | | K78E | |
| | epitope | | | | |
| Guide-CC110 | 3-Other epitope | T322A | 47.48 | N/A | N/A |
| Guide-CC72 | 1-SCF | E257G | 43.28 | Q256R/ | 18.03/1.09 |
| | interfering | | | K258E | |
| | epitope | | | | |
| Guide-CC115 | 3-Other epitope | K484G | 25.17 | N/A | N/A |

[0751] As shown in FIG. 10, four (4) guides, cc71, cc87, cc112, and cc124, used with ABE8.8 and all fourteen (14) guides, cc146, cc148, cc156, cc158, cc161, cc162, cc166, cc167, cc169, cc180, cc182, and cc184 used with IBE-NGC showed less than 40% base editing efficiency (Maxcyte oc-25, 0.3 M, 50 nM editor and 10 uM guide).

[0752] A summary of accessible mutations with a greater than 60% conversion rate is shown in Table 20.

TABLE 20
Summary of accessible mutations (>60% conversion)

| Mutation | Domain | Guide number | Efficiency |
|---|---|---|---|
| D45G | 3-Other epitope | Guide-CC119/114 | 87.19/65.51 |
| Y221C | 3-Other epitope | Guide-CC103/102 | 84.13/70.14 |
| Y259C | 4-Functionally important residues | Guide-CC128 | 83.54 |
| N260V | 4-Functionally important residues | Guide-CC128 | 78.76 |
| T461A | 3-Other epitope | Guide-CC91 | 75.79 |
| L472P | 3-Other epitope | Guide-CC101 (?) | 71.99 |
| M351T | 2-Dimer interfering epitope | Guide-CC79 | 68.67 |
| Q79R | 3-Other epitope | Guide-CC84 | 68.46 |
| L124P | 4-Functionally important residues | Guide-CC126 | 67.84 |
| E81G/D | 3-Other epitope | Guide-CC90 | 66.2 |
| V195A | 3-Other epitope | Guide-CC93 | 64.67 |
| Y125H | 4-Functionally important residues | Guide-CC126 | 60.51 |

[0753] A summary of accessible mutations with about 25% to 60% conversion is shown in Table 21.

TABLE 21
Summary of accessible mutations (25% to 60% conversion)

| Mutation | Domain | Guide number | Efficiency |
|---|---|---|---|
| F324L | 3-Other epitope | Guide-CC98 | 59.4 |
| I163V | 3-Other epitope | Guide-CC125/124 | 56.44/30/31 |
| Y418C | 2-Dimer interfering epitope | Guide-CC78 | 52.25 |
| T144A | 3-Other epitope | Guide-CC89/87 | 50.26/35.61 |
| N77G/Y | 1-SCF interfering epitope | Guide-CC73 | 50.23 |
| T322A | 3-Other epitope | Guide-CC110 | 47.48 |
| E257G | 1-SCF interfering epitope | Guide-CC72 | 43.28 |
| T354A | 2-Dimer interfering epitope | Guide-CC76 | 39.04 |
| V473A | 3-Other epitope | Guide-CC101 | 36.04 |
| Q460R | 3-Other epitope | Guide-CC91 | 33.12 |
| S44P | 3-Other epitope | Guide-CC112 | 29.4 |
| K484G | 3-Other epitope | Guide-CC115 | 25.17 |

[0754] The structural location of the mutations on the CD117 protein targeted by guides cc119, cc128, cc103, cc91, cc101, cc84, cc79, cc126, cc90, cc126, cc93, cc126, cc98, cc78, cc125, cc89, cc73, cc72, cc110, and cc76 are shown in FIGS. 11A-11T, respectively. Table 22 shows the guides with natural occurring mutations. In particular, guides cc20, cc102 and 103 resulted in the Y221C naturally occurring mutation; guides cc27, cc87, cc88, and cc89 resulted in the T144A naturally occurring mutation; and guides cc78 and cc137 resulted in the D419G naturally occurring mutation.

TABLE 22
Guides with natural occurring mutations

| Guide Number | Group | Possible Mutations | Editing Efficiency |
|---|---|---|---|
| Guide-CC20 | 3-Other epitope | S220G Y221C | not selected |
| Guide-CC27 | 3-Other epitope | T144A N145D | not selected |
| Guide-CC29 | 3-Other epitope | I438M D439G | not selected |
| Guide-CC30 | 3-Other epitope | N486G T488A | not selected |
| Guide-CC35 | 3-Other epitope | I39V H40R | not selected |
| Guide-CC38 | 3-Other epitope | T303A T304A | not selected |
| Guide-CC41 | 3-Other epitope | K65E | not selected |
| Guide-CC42 | 3-Other epitope | M318V | not selected |
| Guide-CC70 | 4-Functionally | I201V | not selected |
| | important residues | | |
| Guide-CC78 | 2-Dimer | Y418C D419G | 52.253 |
| | interfering epitope | | |
| Guide-CC87 | 3-Other epitope | T144A N145G | 35.613 |
| Guide-CC88 | 3-Other epitope | T144A N145G | not selected |
| Guide-CC89 | 3-Other epitope | T144A N145G | 50.255 |
| Guide-CC96 | 3-Other epitope | K65R T67A | not selected |
| Guide-CC102 | 3-Other epitope | S220G Y221C | 70.142 |
| Guide-CC103 | 3-Other epitope | S220G Y221C | 84.135 |
| Guide-CC104 | 3-Other epitope | M171T I172T | not selected |
| Guide-CC105 | 3-Other epitope | M171T I172T | not selected |
| Guide-CC106 | 3-Other epitope | I438M D439G | not selected |
| Guide-CC110 | 3-Other epitope | T322A | 47.484 |
| Guide-CC127 | 4-Functionally | K199G I201V | not selected |
| | important residues | | |
| Guide-CC137 | 2-Dimer | Y418C D419G | not selected |
| | interfering epitope | R420G | |
| Guide-CC145 | 3-Other epitope | D52G E53G | not selected |
| | | I54V R55G | |
| Guide-CC146 | 3-Other epitope | D129G N130G | 4.471 |
| | | D131G T132A | |
| Guide-CC150 | 3-Other epitope | N99G K100G | not selected |
| | | H101R | |
| Guide-CC155 | 3-Other epitope | N145S Y146C | not selected |
| Guide-CC164 | 3-Other epitope | M171T I172T | not selected |
| Guide-CC179 | 3-Other epitope | D52G | not selected |
| Guide-CC182 | 3-Other epitope | T59A | 18.415 |
| Guide-CC188 | 4-Functionally | K383G | not selected |
| | important residues | T385A | |
| Guide-CC189 | 4-Functionally | I201V | not selected |
| | important residues | | |

[0755] A CD117 target nucleotide sequence and corresponding amino acid sequence for the S220G and/or Y221C mutations is shown in FIG. 12A. Guide cc102 hybridizes to the complement of the CD117 target sequence shown below:

GCAAGCTATCTTCTTAGGGA

The editing efficiency at different base pair positions along the CD117 target site for guide cc102 is shown in FIG. 12B.

[0756] Guide cc103 hybridizes to the complement of the CD117 target sequence shown below:

CAAGCTATCTTCTTAGGGAA

The editing efficiency at different base pair positions along the CD117 target site for guide cc103 is shown in FIG. 12C.

[0757] A CD117 target nucleotide sequence and corresponding amino acid sequence for the Y418C and/or D419G mutations is shown in FIG. 12D. Guide cc78 hybridizes to the complement of the CD117 target sequence shown below:

ACTTACGACAGGCTCGTGAA

The editing efficiency at different base pair positions along the CD117 target site for guide cc78 is shown in FIG. 12E.

[0758] A CD117 target nucleotide sequence and corresponding amino acid sequence for the T144A and/or N145G mutations is shown in FIG. 12F. Guide cc87 hybridizes to the complement of the CD117 target sequence shown below:

TGACCAATTATTCCCTCAAG

The editing efficiency at different base pair positions along the CD117 target site for guide cc87 is shown in FIG. 12G.

[0759] Guide cc89 hybridizes to the complement of the CD117 target sequence shown below:

AGTGACCAATTATTCCCTCA

The editing efficiency at different base pair positions along the CD117 target site for guide cc89 is shown in FIG. 12H.

[0760] A CD117 target nucleotide sequence and corresponding amino acid sequence for the

ACTACAGTATTTGTAAACGA

The editing efficiency at different base pair positions along the CD117 target site for guide cc110 is shown in FIG. 12J.

[0761] A CD117 target nucleotide sequence and corresponding amino acid sequence for the D129G, N130G, D131G, and/or T132A mutations is shown in FIG. 12K. Guide cc146 hybridizes to the complement of the CD117 target sequence shown below:

AAGACAACGACACGCTGGTC

The editing efficiency at different base pair positions along the CD117 target site for guide cc146 is shown in FIG. 12L.

[0762] A CD117 target nucleotide sequence and corresponding amino acid sequence for the T59A mutation is shown in FIG. 12M. Guide cc182 hybridizes to the complement of the CD117 target sequence shown below:

GGCTGTTATGCACTGATCCG

The editing efficiency at different base pair positions along the CD117 target site for guide cc182 is shown in FIG. 12N.

[0763] The guide screen identified several potential target amino acid substitutions that can be introduced into the CD117 cell surface protein through the use of guide RNAs in combination with base editors. The amino acid substitutions include one or more of the following: T13A, S35P, I39V, H40R, K43G, K43R, S44P, D45G, I47V, D52G, E53G, I54V, R55G, L56P, L57P, T59A, F63P, V64A, K65E, K65R, W66R, T67A, D72G, E73G, T74A, N75D, N75G, E76G, N77G, N77S, N77Y, K78E, K78R, Q79R, N80G, N80S, E81G, E81D, W82R, I83T, I83V, T84A, E85G, K86E, E88G, T90A, N99G, K100G, H101R, K116R, V120A, S123P, L124P, Y125H, K127G, K127R, E128G, D129G, D129E, N130G, N130D, D131G, D131N, T132A, T144A, N145D, N145G, N145Y, N145S, Y146C, K149E, K149G, Q152R, K154E, K154G, R161G, F162P, F162L, I163T, I163V, D165G, M171T, I172T, I172V, K173G, S174G, K176G, Q190R, E191G, K193G, V195A, L196P, S197P, E198G, K199G, F200P, I201T, I201V, L202P, V213A, V214A, S215P, V216A, K218G, K218R, S220G, Y221C, E225G, E227G, E228G, T230A, S240G, Y243C, K247G, R248G, Q256R, E257G, E257D, K258E, K258G, Y259C, Y259H, N260G, D266G, N268D, N268G, Y269C, T276A, I277T, I277V, S279P, R281G, V282A, S285P, N293G, N294G, T295A, F296P, S298P, N300G, N300S, T302A, T303A, T304A, M318V, T322A, V323A, F324L, N326G, D327G, D332G, I334V, K342E, K342G, K342R, Q347R, Y350H, M351T, R353G, T354A, T354I, K358G, E360G, D361G, K364G, E366G, N367G, H378R, T380A, R381G, K383G, T385A, T389A, D398G, V399A, N400G, V407A, Y408H, E414G, I415V, T417A, Y418C, Y418H, D419G, R420G, L421P, V422A, N423S, M425V, E435G, I438M, D439G, V454A, L455P, V457A, V459A, Q460R, T461A, N463G, S464P, S465P, F469P, K471E, K471G, L472P, V473A, Q475R, S476G, I478M, I478V, D479G, S481G, F483P, K484G, N486G, N486S, T488A, Y494C, N495D, D496G, K499E, Y503C, Y503H, F504P, and N505G. Exemplary amino acid substitutions include one or more of the following: T13A, I39V, H40R, D45G, D52G, E53G, I54V, R55G, T59A, K65E, K65R, T67A, E76G, N77G, N77S, N77Y, K78E, Q79R, N80G, E81G, E81D, N99G, K100G, H101R, L124P, Y125H, D129E, D129G, N130D, N130G, D131G, D131N, T132A, T144A, N145D, N145G, N145Y, N145S, Y146C, F162P, F162L, I163T, I163V, M171T, I172T, V195A, L196P, K199G, I201V, S220G, Y221C, Q256R, E257D, E257G, K258E, Y259C, T303A, T304A, M318V, T322A, V323A, F324L, K342G, K342R, Y350H, M351T, R353G, T354A, T354I, R381G, K383G, T385A, Y418C, D419G, R420G, I438M, D439G, Q460R, T461A, K484G, N486G, and T488A. These potential target CD117 amino acid substitutions include naturally occurring mutations. Nonlimiting examples of CD117 naturally occurring mutations include: T13A, N77S, D129E, N130D, D131N, T144A, Y221C, E257D, T322A, T354I, D419G. Overall, one or more of these mutations can be used to identify anti-CD117 antibodies that bind to wild-type CD117 cells and do not bind CD117 in gene edited cells.

### Example 3: Multiplex Editing

[0764] The guides identified in Example 2 may be used in methods for multiplex editing. Multiplex editing may be used, for example, for the treatment of hemoglobinopathy, such as sickle cell disease (SCD) or hereditary persistence of fetal hemoglobin (HPFH), hematologic cancer, or myeloproliferative disease.

[0765] In one experiment, guides 1-132 are used in combination with the HPFH guide along with the ABE8.8 editor to introduce an amino acid substitution in the CD117 cell surface protein for conditioning and in an HPFH polynucleotide for correcting a mutation associated with HPFH. In particular, 4 μg of a guide selected from cc72, cc73, cc78, cc79, cc84, cc89, cc90, cc91, c93, cc102, cc103, cc110, cc114, cc119, or cc125 was used in combination with 4 μg of the HPFH guide along with the ABE8.8 editor to induce A to G edits (FIG. 13A). Single editing with no HPFH guide was used as a control. Similarly, HPFH editing was also tested using the dual guides at either 72 or 120 hours (FIG. 13B). Single editing with only an HPFH guide was used as a control.

[0766] In another experiment, guides 133-189 are used in combination with the Makassar guide along with the IBE-NGC editor to introduce an amino acid substitution in the CD117 cell surface protein for conditioning and in a beta globin (HBB) polynucleotide (Makassar) for correcting a mutation associated with sickle cell. The multiplex editing methods described herein can be further optimized.

### Example 4: Materials and Methods

### General Methods:

[0767] Cloning can be conducted via USER enzyme (New England Biolabs) cloning methods (see Geu-Flores et al., USER fusion: a rapid and efficient method for simultaneous fusion and cloning of multiple PCR products. Nucleic Acids Res 35, e55, doi:10.1093/nar/gkm106 (2007)) and templates for PCR amplification were purchased as bacterial or mammalian codon optimized gene fragments (GeneArt). Vectors created were transformed into Mach T1^{R} Competent Cells (ThermoFisher Scientific) and maintained at −80 C for long-term storage. Primers used in this work can be purchased from Integrated DNA Technologies and PCRS were carried out using either Phusion U DNA Polymerase Green MultiPlex PCR Master Mix (ThermoFisher) or Q5 Hot Start High-Fidelity 2× Master Mix (New England Biolabs). Plasmids used in this work can be freshly prepared from 50 mL of Mach1 culture using ZymoPURE Plasmid Midiprep (Zymo Research Corporation) which involves an endotoxin removal procedure. Molecular biology grade, Hyclone water (GE Healthcare Life Sciences) was used in all assays, transfections, and PCR reactions to ensure exclusion of DNAse activity.

[0768] Amino acid sequences of sgRNAs used for Hek293T mammalian cell transfection are provided in Table 23 below. When a target DNA sequence did not start with a ‘G,’ a ‘G’ was added to the 5′ end of the primer since it has been established that the human U6 promoter prefers a ‘G’ at the transcription start site (see Cong, L. et al., Multiplex genome engineering using CRISPR/Cas systems. Science 339, 819-823, doi:10.1126/science.1231143 (2013)). The pFYF sgRNA plasmid described previously was used as a template for PCR amplification. Table 23 also identifies the nucleic acid target sequence, PAM sequence, and potential amino acid substitutions.

[0769] The spCas9 guide scaffold polynucleotide sequence used for the guide RNAs in Table 23 is as follows:

GTTTTAGAGCTAGAAATAGCAAGTTAAAATAAGGCTAGTCCGTTATCAA
CTTGAAAAAGTGGCACCGAGTCGGTGC

TABLE 23
Sequences of sgRNAs used for Hek293Tmammalian cell transfection.

| Guide No. | Guide Sequence | Target Sequence | PAM | Mutations |
|---|---|---|---|---|
| Guide-CC1 | AUGAAACGAAUGAGAAUAAG | ATGAAACGAATGAGAATAAG | CAG | E73G |
| | | | | T74A |
| | | | | N75D |
| Guide-CC2 | UGGAUGAAACGAAUGAGAAU | TGGATGAAACGAATGAGAAT | AAG | D72G |
| | | | | E73G |
| | | | | T74A |
| Guide-CC3 | GCCAGGGGAAGCCUCUUCCC | GCCAGGGGAAGCCTCTTCCC | AAG | Q152R |
| | | | | K154E |
| Guide-CC4 | UCUGUGUACUCAACGUGGAA | TCTGTGTACTCAACGTGGAA | AAG | Y243C |
| Guide-CC5 | UGUGUACUCAACGUGGAAAA | TGTGTACTCAACGTGGAAAA | GAG | Y243C |
| Guide-CC6 | GGGAAGAUUAUCCCAAGUCU | GGGAAGATTATCCCAAGTCT | GAG | E360G |
| | | | | D361G |
| Guide-CC7 | CCAGAAAUCCUGACUUACGA | CCAGAAATCCTGACTTACGA | CAG | E414G |
| | | | | 1415V |
| Guide-CC8 | UCUGAGAAUGAAAGUAAUAU | TCTGAGAATGAAAGTAATAT | CAG | E366G |
| | | | | N367G |
| Guide-CC9 | CUAUUUUAACUUUGCAUUUA | CTATTTTAACTTTGCATTTA | AAG | Y503C |
| | | | | N505G |
| Guide-CC10 | UUCACGAGCCUGUCGUAAGU | TTCACGAGCCTGTCGTAAGT | CAG | L421P |
| | | | | V422A |
| Guide-CC11 | CAGCAGUGGAUCUAUAUGAA | CAGCAGTGGATCTATATGAA | CAG | Q347R |
| Guide-CC12 | CAUUCCCCAAACCUGAACAC | CATTCCCCAAACCTGAACAC | CAG | K342E |
| Guide-CC13 | UAUCCCAAGUCUGAGAAUGA | TATCCCAAGTCTGAGAATGA | AAG | K364G |
| Guide-CC14 | AUAAAUGGGAAGAUUAUCCC | ATAAATGGGAAGATTATCCC | AAG | K358G |
| Guide-CC15 | UCCCCAAACCUGAACACCAG | TCCCCAAACCTGAACACCAG | CAG | K342G |
| Guide-CC16 | GCCAUUCACGAGCCUGUCGU | GCCATTCACGAGCCTGTCGT | AAG | V422A |
| Guide-CC17 | AAAUGUCACAACAACCUUGG | AAATGTCACAACAACCTTGG | AAG | N300S |
| | | | | T302A |
| Guide-CC18 | CGUGGAAAAGAGAAAACAGU | CGTGGAAAAGAGAAAACAGT | CAG | K247G |
| | | | | R248G |
| Guide-CC19 | CCAUUUGACAAAGCCCGGAU | CCATTTGACAAAGCCCGGAT | CAG | V64A |
| | | | | W66R |
| Guide-CC20 | AGCAAGCUAUCUUCUUAGGG | AGCAAGCTATCTTCTTAGGG | AAG | S220G |
| | | | | Y221C |
| Guide-CC21 | UGAGGUUUAUUCCUGACCCC | TGAGGTTTATTCCTGACCCC | AAG | R161G |
| | | | | I163V |
| Guide-CC22 | UGAAUGGAUCACGGAAAAGG | TGAATGGATCACGGAAAAGG | CAG | E81G |
| | | | | I83V |
| Guide-CC23 | CCACUGGCAGUACAGAAGCA | CCACTGGCAGTACAGAAGCA | GAG | L455P |
| | | | | V457A |
| Guide-CC24 | AGAAUGAAUGGAUCACGGAA | AGAATGAATGGATCACGGAA | AAG | N80G |
| | | | | E81G |
| Guide-CC25 | UGUAAACGAUGGAGAAAAUG | TGTAAACGATGGAGAAAATG | TAG | N326G |
| | | | | D327G |
| Guide-CC26 | AGGCUUACAACGAUGUGGGC | AGGCTTACAACGATGTGGGC | AAG | Y494C |
| | | | | N495D |
| Guide-CC27 | AAGUGACCAAUUAUUCCCUC | AAGTGACCAATTATTCCCTC | AAG | T144A |
| | | | | N145D |
| Guide-CC28 | UGUCACAACAACCUUGGAAG | TGTCACAACAACCTTGGAAG | TAG | T302A |
| | | | | T303A |
| Guide-CC29 | AAUAGAUUGGUAUUUUUGUC | AATAGATTGGTATTTTTGTC | CAG | I438M |
| | | | | D439G |
| Guide-CC30 | ACAAUGGCACGGUUGAAUGU | ACAATGGCACGGTTGAATGT | AAG | N486G |
| | | | | T488A |
| Guide-CC31 | ACACAACAGGCACAGCUUUG | ACACAACAGGCACAGCTTTG | AAG | V213A |
| | | | | V214A |
| Guide-CC32 | GUUCAGAGUUCUAUAGAUUC | GTTCAGAGTTCTATAGATTC | TAG | Q475R |
| | | | | S476G |
| Guide-CC33 | AGAUUUGAUUGUUGAAUAUG | AGATTTGATTGTTGAATATG | AAG | D332G |
| | | | | I334V |
| Guide-CC34 | AUAAACAUUAAAUGCUAUGG | ATAAACATTAAATGCTATGG | CAG | V407A |
| | | | | Y408H |
| Guide-CC35 | AUCCAUCCAUCCAGGAAAAU | ATCCATCCATCCAGGAAAAT | CAG | I39V |
| | | | | H40R |
| Guide-CC36 | AUGGAUCACGGAAAAGGCAG | ATGGATCACGGAAAAGGCAG | AAG | I83V |
| | | | | T84A |
| Guide-CC37 | GUUGACUAUCAGUUCAGCGA | GTTGACTATCAGTTCAGCGA | GAG | T276A |
| | | | | I277V |
| Guide-CC38 | CACAACAACCUUGGAAGUAG | CACAACAACCTTGGAAGTAG | TAG | T303A |
| | | | | T304A |
| Guide-CC39 | GUAUAGAUUCUAGUGCAUUC | CTATAGATTCTAGTGCATTC | AAG | I478V |
| | | | | D479G |
| Guide-CC40 | UGCCAAUAAUACUUUUGGAU | TGCCAATAATACTTTTGGAT | CAG | N293G |
| | | | | N294G |
| Guide-CC41 | GCUUUGUCAAAUGGACUUUU | GCTTTGTCAAATGGACTTTT | GAG | K65E |
| Guide-CC42 | CUUCCCCAUGAUAAACACUA | CTTCCCCATGATAAACACTA | CAG | M318V |
| Guide-CC43 | CGUUUGGAAAGCUAGUGGUU | CGTTTGGAAAGCTAGTGGTT | CAG | K471E |
| Guide-CC44 | AAACUACAGGAGAAAUAUAA | AAACTACAGGAGAAATATAA | TAG | Q256R |
| Guide-CC45 | AGGAGGCACUUACACAUUCC | AGGAGGCACTTACACATTCC | TAG | T389A |
| Guide-CC46 | CUUGAAUGCACUAGAAUCUA | CTTGAATGCACTAGAATCTA | TAG | F483P |
| Guide-CC47 | UUCCAAACGGUGGCCCAGAU | TTCCAAACGGTGGCCCAGAT | GAG | F469P |
| Guide-CC48 | UCCAGGAAAAUCAGACUUAA | TCCAGGAAAATCAGACTTAA | TAG | K43G |
| Guide-CC49 | CCCUCAAGGGGUGCCAGGGG | CCCTCAAGGGGTGCCAGGGG | AAG | K149G |
| Guide-CC50 | UCCAAAGCAAGCUAUCUUCU | TCCAAAGCAAGCTATCTTCT | TAG | K218G |
| Guide-CC51 | UAGGGAAGGGGAAGAAUUCA | TAGGGAAGGGGAAGAATTCA | CAG | E225G |
| Guide-CC52 | AGCGAGAGUUAAUGAUUCUG | AGCGAGAGTTAATGATTCTG | GAG | R281G |
| Guide-CC53 | UUUGGAAAGCUAGUGGUUCA | TTTGGAAAGCTAGTGGTTCA | GAG | K471G |
| Guide-CC54 | AGACGGUUCCCCUGGACUCA | AGACGGTTCCCCTGGACTCA | CAG | S35P |
| Guide-CC55 | ACGUUGACUAUCAGUUCAGC | ACGTTGACTATCAGTTCAGC | GAG | T276A |
| Guide-CC56 | CUGCACAUCCACUGGCAGUA | CTGCACATCCACTGGCAGTA | CAG | V459A |
| Guide-CC57 | CACAUCCACUGGCAGUACAG | CACATCCACTGGCAGTACAG | AAG | V457A |
| Guide-CC58 | AUCCACUGGCAGUACAGAAG | ATCCACTGGCAGTACAGAAG | CAG | V457A |
| Guide-CC59 | UUGACGUCAGAAUUGGACAC | TTGACGTCAGAATTGGACAC | TAG | V399A |
| Guide-CC60 | AUUAACUCUCGCUGAACUGA | ATTAACTCTCGCTGAACTGA | TAG | V282A |
| Guide-CC61 | CCAUACAAGGAGCGGUCAAC | CCATACAAGGAGCGGTCAAC | AAG | L124P |
| | | | | Y125H |
| Guide-CC62 | UUCAGGAUGAAUUUUUCCGA | TTCAGGATGAATTTTTCCGA | CAG | I201T |
| | | | | L202P |
| Guide-CC63 | GUGACUUCAAUUAUGAACGU | GTGACTTCAATTATGAACGT | CAG | D266G |
| | | | | N268D |
| Guide-CC64 | GUCGGAAAAAUUCAUCCUGA | GTCGGAAAAATTCATCCTGA | AAG | E198G |
| | | | | K199G |
| Guide-CC65 | AUUAUAUUUCUCCUGUAGUU | ATTATATTTCTCCTGTAGTT | TAG | Y259H |
| Guide-CC66 | AAGGAGCGGUCAACAAGGAA | AAGGAGCGGTCAACAAGGAA | AAG | S123P |
| Guide-CC67 | GAGAUUAAAAGGCACCGAAG | GAGATTAAAAGGCACCGAAG | GAG | K383G |
| Guide-CC68 | AACGAGAUUAAAAGGCACCG | AACGAGATTAAAAGGCACCG | AAG | R381G |
| Guide-CC69 | GAAAAAUUCAUCCUGAAAGU | GAAAAATTCATCCTGAAAGT | GAG | K199G |
| Guide-CC70 | AUUCAUCCUGAAAGUGAGGC | ATTCATCCTGAAAGTGAGGC | CAG | I201V |
| Guide-CC71 | GAAAGAAGACAACGACACGC | GAAAGAAGACAACGACACGC | TGG | K127R |
| | | | | E128G |
| | | | | D129G |
| Guide-CC72 | UACAGGAGAAAUAUAAUAGC | TACAGGAGAAATATAATAGC | TGG | Q256R |
| | | | | E257G |
| | | | | K258E |
| Guide-CC73 | AUGAGAAUAAGCAGAAUGAA | ATGAGAATAAGCAGAATGAA | TGG | E76G |
| | | | | N77G |
| | | | | K78E |
| Guide-CC74 | CCAGGGGAAGCCUCUUCCCA | CCAGGGGAAGCCTCTTCCCA | AGG | Q152R |
| | | | | K154G |
| Guide-CC75 | CAGAAAUCCUGAGUUACGAC | CAGAAATCCTGACTTAGGAC | AGG | E414G |
| | | | | I415V |
| Guide-CC76 | ACAGAACCUUCACUGAUAAA | ACAGAACCTTCACTGATAAA | TGG | R353G |
| | | | | T354A |
| Guide-CC77 | UCACGAGCCUGUCGUAAGUC | TCACGAGCCTGTCGTAAGTC | AGG | L421P |
| | | | | V422A |
| Guide-CC78 | ACUUACGACAGGCUCGUGAA | ACTTACGACAGGCTCGTGAA | TGG | Y418C |
| | | | | D419G |
| Guide-CC79 | UGUUCAUAUAGAUCCACUGC | TGTTCATATAGATCCACTGC | TGG | M351T |
| Guide-CC80 | CCAAACCUGAACACCAGCAG | CCAAACCTGAACACCAGCAG | TGG | K342G |
| Guide-CC81 | CUGUCGUAAGUCAGGAUUUC | CTGTCGTAAGTCAGGATTTC | TGG | Y418H |
| Guide-CC82 | CAGAACCUUCACUGAUAAAU | CAGAACCTTCACTGATAAAT | GGG | T354A |
| Guide-CC83 | UAUUUUAACUUUGCAUUUAA | TATTTTAACTTTGCATTTAA | AGG | N505G |
| Guide-CC84 | UAAGCAGAAUGAAUGGAUCA | TAAGCAGAATGAATGGATCA | CGG | K78R |
| | | | | Q79R |
| | | | | N80G |
| Guide-CC85 | GAAUGGCAUGCUCCAAUGUG | GAATGGCATGCTCCAATGTG | TGG | N423S |
| | | | | M425V |
| Guide-CC86 | GUGCAGACACUAAACUCAUC | GTGCAGACACTAAACTCATC | TGG | Q460R |
| | | | | T461A |
| Guide-CC87 | UGACCAAUUAUUCCCUCAAG | TGACCAATTATTCCCTCAAG | GGG | T144A |
| | | | | N145G |
| Guide-CC88 | GUGACCAAUUAUUCCCUCAA | GTGACCAATTATTCCCTCAA | GGG | T144A |
| | | | | N145G |
| Guide-CC89 | AGUGACCAAUUAUUCCCUCA | AGTGACCAATTATTCCCTCA | AGG | T144A |
| | | | | N145G |
| Guide-CC90 | GAAUGAAUGGAUCACGGAAA | GAATGAATGGATCACGGAAA | AGG | N80S |
| | | | | E81G |
| Guide-CC91 | UGCAGACACUAAACUCAUCU | TGCAGACACTAAACTCATCT | GGG | Q460R |
| | | | | T461A |
| Guide-CC92 | CCAAAGCAAGCUAUCUUCUU | CCAAAGCAAGCTATCTTCTT | AGG | K218G |
| | | | | S220G |
| Guide-CC93 | ACAGCACUGACUUGCCCUCC | ACAGCACTGACTTGCCCTCC | TGG | V195A |
| | | | | L196P |
| Guide-CC94 | GGAGGGCAAGUCAGUGCUGU | GGAGGGCAAGTCAGTGCTGT | CGG | E191G |
| | | | | K193G |
| Guide-CC95 | CACAUAAACAUUAAAUGCUA | CACATAAACATTAAATGCTA | TGG | V407A |
| | | | | Y408H |
| Guide-CC96 | CAAAUGGACUUUUGAGAUCC | CAAATGGACTTTTGAGATCC | TGG | K65R |
| | | | | T67A |
| Guide-CC97 | CAAUGGCACGGUUGAAUGUA | CAATGGCACGGTTGAATGTA | AGG | N486S |
| | | | | T488A |
| Guide-CC98 | AAAUACUGUAGUGUUUAUGA | AAATACTGTAGTGTTTATCA | TGG | V323A |
| | | | | F324L |
| Guide-CC99 | CAAAGCAAGCUAUCUUCUUA | CAAAGCAAGCTATCTTCTTA | GGG | K218R |
| | | | | S220G |
| Guide-CC100 | GGAAUAAACCUCAAGUCCUU | GGAATAAACCTCAAGTCCTT | GGG | F162P |
| | | | | I163T |
| Guide-CC101 | ACCACUAGCUUUCCAAACGG | ACCACTAGCTTTCCAAACGG | TGG | L472P |
| | | | | V473A |
| Guide-CC102 | GCAAGCUAUCUUCUUAGGGA | GCAAGCTATCTTCTTAGGGA | AGG | S220G |
| | | | | Y221C |
| Guide-CC103 | CAAGCUAUCUUCUUAGGGAA | CAAGCTATCTTCTTAGGGAA | GGG | S220G |
| | | | | Y221C |
| Guide-CC104 | UUUGAUCAUGAUGCCCGCCU | TTTGATCATGATGCCCGCCT | TGG | M171T |
| | | | | I172T |
| Guide-CC105 | UUGAUCAUGAUGCCCGCCUU | TTGATCATGATGCCCGCCTT | GGG | M171T |
| | | | | I172T |
| Guide-CC106 | AUAGAUUGGUAUUUUUGUCC | ATAGATTGGTATTTTTGTCC | AGG | 1438M |
| | | | | D439G |
| Guide-CC107 | AGGAAUAAACCUCAAGUCCU | AGGAATAAACCTCAAGTCCT | TGG | F162P |
| | | | | I163T |
| Guide-CC108 | CACAACAGGCACAGCUUUGA | CACAACAGGCACAGCTTTGA | AGG | V213A |
| Guide-CC109 | UGACGUCAGAAUUGGACACU | TGACGTCAGAATTGGACACT | AGG | V399A |
| Guide-CC110 | ACUACAGUAUUUGUAAACGA | ACTACAGTATTTGTAAACGA | TGG | T322A |
| Guide-CC111 | AGCAAAUGUCACAACAACCU | AGCAAATGTCACAACAACCT | TGG | N300G |
| Guide-CC112 | GUCUGAUUUUCCUGGAUGGA | GTCTGATTTTCCTGGATGGA | TGG | S44P |
| Guide-CC113 | UGCUGAUCCAAAAGUAUUAU | TGCTGATCCAAAAGTATTAT | TGG | S298P |
| Guide-CC114 | AUCAGACUUAAUAGUCCGCG | ATCAGACTTAATAGTCCGCG | TGG | D45G |
| Guide-CC115 | UGCAUUCAAGCACAAUGGCA | TGCATTCAAGCACAATGGCA | CGG | K484G |
| Guide-CC116 | UCCCAGAGCCCACAAUAGAU | TCCCAGAGCCCACAATAGAT | TGG | E435G |
| Guide-CC117 | UCAGCGAGAGUUAAUGAUUC | TCAGCGAGAGTTAATGATTC | TGG | R281G |
| Guide-CC118 | GUGUGAAACGCGCCUACCAU | GTGTGAAACGCGCCTACCAT | CGG | K176G |
| Guide-CC119 | UCAGACUUAAUAGUCCGCGU | TCAGACTTAATAGTCCGCGT | GGG | D45G |
| Guide-CC120 | UCUAGUGCAUUCAAGCACAA | TCTAGTGCATTCAAGCACAA | TGG | S481G |
| Guide-CC121 | AUUCCCUCAAGGGGUGCCAG | ATTCCCTCAAGGGGTGCCAG | GGG | K149E |
| Guide-CC122 | AAGGCAGAAGCCACCAACAC | AAGGCAGAAGCCACCAACAC | CGG | E88G |
| Guide-CC123 | GAGGUUUAUUCCUGACCCCA | GAGGTTTATTCCTGACCCCA | AGG | I163V |
| Guide-CC124 | UUUAUUCCUGACCCCAAGGC | TTTATTCCTGACCCCAAGGC | GGG | I163V |
| Guide-CC125 | GUUUAUUCCUGACCCCAAGG | GTTTATTCCTGACCCCAAGG | CGG | I163V |
| Guide-CC126 | CAUACAAGGAGCGGUCAACA | CATACAAGGAGCGGTCAACA | AGG | L124P |
| | | | | Y125H |
| Guide-CC127 | AAAAAUUCAUCCUGAAAGUG | AAAAATTCATCCTGAAAGTG | AGG | K199G |
| | | | | I201V |
| Guide-CC128 | AAAUAUAAUAGCUGGCAUCA | AAATATAATAGCTGGCATCA | CGG | Y259C |
| | | | | N260G |
| Guide-CC129 | UGACUUCAAUUAUGAACGUC | TGACTTCAATTATGAACGTC | AGG | D266G |
| | | | | N268G |
| Guide-CC130 | CUAGUUCUGUGUACUCAACG | CTAGTTCTGTGTACTCAACG | TGG | S240G |
| Guide-CC131 | AGAUUAAAAGGCACCGAAGG | AGATTAAAAGGCACCGAAGG | AGG | K383G |
| Guide-CC132 | ACGAGAUUAAAAGGCACCGA | ACGAGATTAAAAGGCACCGA | AGG | R381G |
| Guide-CC133 | GGAUGAAACGAAUGAGAAUA | GGATGAAACGAATGAGAATA | AGC | E73G |
| | | | | T74A |
| | | | | N75G |
| Guide-CC134 | AACUACAGGAGAAAUAUAAU | AACTACAGGAGAAATATAAT | AGC | Q256R |
| | | | | E257G |
| | | | | K258G |
| Guide-CC135 | UGGGAAAGAAGACAACGACA | TGGGAAAGAAGACAACGACA | CGC | K127G |
| | | | | E128G |
| | | | | D129G |
| Guide-CC136 | GCCAAUAAUACUUUUGGAUC | GCCAATAATACTTTTGGATC | AGC | N293G |
| | | | | N294G |
| | | | | T295A |
| Guide-CC137 | CUUACGACAGGCUCGUGAAU | CTTACGACAGGCTCGTGAAT | GGC | Y418C |
| | | | | D419G |
| | | | | R420G |
| Guide-CC138 | GUUAAAAUAGGCAGAAGUCU | GTTAAAATAGGCAGAAGTCT | TGC | Y503H |
| | | | | F504P |
| Guide-CC139 | UUCUGUUCAUAUAGAUCCAC | TTCTGTTCATATAGATCCAC | TGC | Y350H |
| | | | | M351T |
| Guide-CC140 | AGAAAUCCUGACUUACGACA | AGAAATCCTGACTTACGACA | GGC | I415V |
| | | | | T417A |
| Guide-CC141 | AACGAUGUGGGCAAGACUUC | AACGATGTGGGCAAGACTTC | TGC | D496G |
| | | | | K499E |
| Guide-CC142 | AUUCCCCAAACCUGAACACC | ATTCCCCAAACCTGAACACC | AGC | K342G |
| Guide-CC143 | CGACAGGCUCGUGAAUGGCA | CGACAGGCTCGTGAATGGCA | TGC | R420G |
| Guide-CC144 | ACUUCUGCCUAUUUUAACUU | ACTTCTGCCTATTTTAACTT | TGC | Y503C |
| Guide-CC145 | GCGACGAGAUUAGGCUGUUA | GCGACGAGATTAGGCTGTTA | TGC | D52G |
| | | | | E53G |
| | | | | I54V |
| | | | | R55G |
| Guide-CC146 | AAGACAACGACACGCUGGUC | AAGACAACGACACGCTGGTC | CGC | D129G |
| | | | | N130G |
| | | | | D131G |
| | | | | T132A |
| Guide-CC147 | UGGAUCACGGAAAAGGCAGA | TGGATCACGGAAAAGGCAGA | AGC | I83V |
| | | | | T84A |
| | | | | E85G |
| | | | | K86E |
| Guide-CC148 | GACACAGACACAACAGGCAC | GACACAGACACAACAGGCAC | AGC | V213A |
| | | | | V214A |
| | | | | S215P |
| | | | | V216A |
| Guide-CC149 | GGGAAGAAUUCACAGUGACG | GGGAAGAATTCACAGTGACG | TGC | E227G |
| | | | | E228G |
| | | | | T230A |
| Guide-CC150 | GCACCAACAAACACGGCUUA | GCACCAACAAACACGGCTTA | AGC | N99G |
| | | | | K100G |
| | | | | H101R |
| Guide-CC151 | UAUAGAUUCUAGUGCAUUCA | TATAGATTCTAGTGCATTCA | AGC | I478M |
| | | | | D479G |
| | | | | S481G |
| Guide-CC152 | UCAUGAUCAAAAGUGUGAAA | TCATGATCAAAAGTGTGAAA | CGC | I172V |
| | | | | K173G |
| | | | | S174G |
| Guide-CC153 | AUGAUCAAAAGUGUGAAACG | ATGATCAAAAGTGTGAAACG | CGC | I172V |
| | | | | K173G |
| | | | | S174G |
| Guide-CC154 | AAUGAAUGGAUCACGGAAAA | AATGAATGGATCACGGAAAA | GGC | E81G |
| | | | | I83V |
| | | | | T84A |
| Guide-CC155 | CCAAUUAUUCCCUCAAGGGG | CCAATTATTCCCTCAAGGGG | TGC | N145S |
| | | | | Y146C |
| Guide-CC156 | CAGACUUAAUAGUCCGCGUG | CAGACTTAATAGTCCGCGTG | GGC | D45G |
| | | | | I47V |
| Guide-CC157 | UCUGACGUCAAUGCUGCCAU | TCTGACGTCAATGCTGCCAT | AGC | D398G |
| | | | | N400G |
| Guide-CC158 | GCAUAACAGCCUAAUCUCGU | GCATAACAGCCTAATCTCGT | CGC | L56P |
| | | | | L57P |
| Guide-CC159 | UUUUUCCGACAGCACUGACU | TTTTTCCGACAGCACTGACT | TGC | L196P |
| | | | | S197P |
| Guide-CC160 | UUUCCGUGAUCCAUUCAUUC | TTTCCGTGATCCATTCATTC | TGC | W82R |
| | | | | I83T |
| Guide-CC161 | UUUGACAAAGCCCGGAUCAG | TTTGACAAAGCCCGGATCAG | TGC | F63P |
| | | | | V64A |
| Guide-CC162 | GCCCAGAUGAGUUUAGUGUC | GCCCAGATGAGTTTAGTGTC | TGC | S464P |
| | | | | S465P |
| Guide-CC163 | GCUGAACUGAUAGUCAACGU | GCTGAACTGATAGTCAACGT | TGC | I277T |
| | | | | S279P |
| Guide-CC164 | ACACUUUUGAUCAUGAUGCC | ACACTTTTGATCATGATGCC | CGC | M171T |
| | | | | I172T |
| Guide-CC165 | GAAAAUCAGACUUAAUAGUC | GAAAATCAGACTTAATAGTC | CGC | K43R |
| | | | | D45G |
| Guide-CC166 | GCAGACACUAAACUCAUCUG | GCAGACACTAAACTCATCTG | GGC | T461A |
| | | | | N463G |
| Guide-CC167 | GGACCAGGAGGGCAAGUCAG | GGACCAGGAGGGCAAGTCAG | TGC | Q190R |
| | | | | E191G |
| Guide-CC168 | GCUGAUCCAAAAGUAUUAUU | GCTGATCCAAAAGTATTATT | GGC | F296P |
| | | | | S298P |
| Guide-CC169 | ACAUCCACUGGCAGUACAGA | ACATCCACTGGCAGTACAGA | AGC | L455P |
| | | | | V457A |
| Guide-CC170 | CACUGGCAGUACAGAAGCAG | CACTGGCAGTACAGAAGCAG | AGC | V454A |
| | | | | L455P |
| Guide-CC171 | AGGCAGAAGCCACCAACACC | AGGCAGAAGCCACCAACACC | GGC | E88G |
| | | | | T90A |
| Guide-CC172 | AGGUUUAUUCCUGACCCCAA | AGGTTTATTCCTGACCCCAA | GGC | I163V |
| Guide-CC173 | CCAAGCUUUUCCUUGUUGAC | CCAAGCTTTTCCTTGTTGAC | CGC | K116R |
| Guide-CC174 | UUAGUGUCUGCACAUCCACU | TTAGTGTCTGCACATCCACT | GGC | V459A |
| Guide-CC175 | CCACUAGCUUUCCAAACGGU | CCACTAGCTTTCCAAACGGT | GGC | L472P |
| Guide-CC176 | CCUCAAGGGGUGCCAGGGGA | CCTCAAGGGGTGCCAGGGGA | AGC | K149G |
| Guide-CC177 | UGUGAAACGCGCCUACCAUC | TGTGAAACGCGCCTACCATC | GGC | K176G |
| Guide-CC178 | CUAGUGCAUUCAAGCACAAU | CTAGTGCATTCAAGCACAAT | GGC | K484G |
| Guide-CC179 | CCGCGUGGGCGACGAGAUUA | CCGCGTGGGCGACGAGATTA | GGC | D52G |
| Guide-CC180 | UUAUUCCUGACCCCAAGGCG | TTATTCCTGACCCCAAGGCG | GGC | D165G |
| Guide-CC181 | ACUCCAGAAUCAUUAACUCU | ACTCCAGAATCATTAACTCT | CGC | S285P |
| Guide-CC182 | GGCUGUUAUGCACUGAUCCG | GGCTGTTATGCACTGATCCG | GGC | T59A |
| Guide-CC183 | UUCAUCUAACGAGAUUAAAA | TTCATCTAACGAGATTAAAA | GGC | H378R |
| | | | | T380A |
| | | | | R381G |
| Guide-CC184 | ACAGGAGAAAUAUAAUAGCU | ACAGGAGAAATATAATAGCT | GGC | E257G |
| | | | | K258G |
| | | | | Y259C |
| Guide-CC185 | UCAGGAUGAAUUUUUCCGAC | TCAGGATGAATTTTTCCGAC | AGC | F200P |
| | | | | I201T |
| Guide-CC186 | GACUUCAAUUAUGAACGUCA | GACTTCAATTATGAACGTCA | GGC | N268G |
| | | | | Y269C |
| Guide-CC187 | AGGAGCGGUCAACAAGGAAA | AGGAGCGGTCAACAAGGAAA | AGC | V120A |
| | | | | S123P |
| Guide-CC188 | GAUUAAAAGGCACCGAAGGA | GATTAAAAGGCACCGAAGGA | GGC | K383G |
| | | | | T385A |
| Guide-CC189 | AAAAUUCAUCCUGAAAGUGA | AAAATTCATCCTGAAAGTGA | GGC | I201V |

### General HEK293T Mammalian Culture Conditions

[0770] Cells were cultured at 37° C. with 5% CO₂. HEK293T cells [CLBTx013, American Type Cell Culture Collection (ATCC)] were cultured in Dulbecco's modified Eagles medium plus Glutamax (10566-016, Thermo Fisher Scientific) with 10% (v/v) fetal bovine serum (A31606-02, Thermo Fisher Scientific). Cells were tested negative for mycoplasma after receipt from supplier.

Hek293T Plasmid Transfection and gDNA Extraction

[0771] HEK293T cells were seeded onto 48-well well Poly-D-Lysine treated BioCoat plates (Corning) at a density of 35,000 cells/well and transfected 18-24 hours after plating. Cells were counted using a NucleoCounter NC-200 (Chemometec). To these cells were added 750 ng of base editor or nuclease control, 250 ng of sgRNA, and 10 ng of GFP-max plasmid (Lonza) diluted to 12.5 μL total volume in Opti-MEM reduced serum media (ThermoFisher Scientific). The solution was combined with 1.5 μL of Lipofectamine 2000 (ThermoFisher) in 11 μL of Opti-MEM reduced serum media and left to rest at room temperature for 15 min. The entire 25 μmixture was then transferred to the pre-seeded Hek293T cells and left to incubate for about 120 h. Following incubation, media was aspirated and cells were washed two times with 250 μL of 1×PBS solution (ThermoFisher Scientific) and 100 μL of freshly prepared lysis buffer was added (100 mM Tris-HCl, pH 7.0, 0.05% SDS, 25 μg/mL Proteinase K (Thermo Fisher Scientific). Transfection plates containing lysis buffer were incubated at 37° C. for 1 hour and the mixture was transferred to a 96-well PCR plate and heated at 80° C. for 30 min.

### Analysis of DNA and RNA Off-Target Editing

[0772] HEK293T cells were plated on 48-well poly-D-lysine coated plates (Corning) 16 to 20 hours before lipofection at a density of 30,000 cells per well in DMEM+Glutamax medium (Thermo Fisher Scientific) without antibiotics. 750 ng nickase or base editor expression plasmid DNA was combined with 250 ng of sgRNA expression plasmid DNA in 15 μl OPTIMEM+Glutamax. This was combined with 10 μl of lipid mixture, comprising 1.5 μl Lipofectamine 2000 and 8.5 μl OPTIMEM+Glutamax per well. Cells were harvested 3 days after transfection and either DNA or RNA was harvested. For DNA analysis, cells were washed once in 1×PBS, and then lysed in 100 μl QuickExtract™ Buffer (Lucigen) according to the manufacturer's instructions. For RNA harvest, the MagMAX™ mirVana™ Total RNA Isolation Kit (Thermo Fisher Scientific) was used with the KingFisher™ Flex Purification System according to the manufacturer's instructions.

[0773] Targeted RNA sequencing was performed largely as previously described (see Rees, H. A. et al., Analysis and minimization of cellular RNA editing by DNA adenine base editors. Sci Adv 5, eaax5717, doi:10.1126/sciadv.aax5717 (2019)). cDNA was prepared from the isolated RNA using the SuperScript IV One-Step RT-PCR System with EZDnase (Thermo Fisher Scientific) according to the manufacturer's instructions. The following program was used: 58° C. for 12 min; 98° C. for 2 min; followed by PCR cycles which varied by amplicon: for CTNNB1 and IP90: 32 cycles of [98° C. for 10 sec; 60° C. for 10 sec; 72° C. for 30 sec] and for RSL1D1 35 cycles of [98° C. for 10 sec; 58° C. for 10 sec; 72° C. for 30 sec]. No RT controls were run concurrently with the samples. Following the combined RT-PCR, amplicons were barcoded and sequenced using an Illumina Miseq as described above.

[0774] Off-target DNA sequencing was performed using previously published primers (see Komor, A. C. et al., Programmable editing of a target base in genomic DNA without double-stranded DNA cleavage. Nature 533, 420-424, doi:10.1038/nature17946 (2016); Rees, H. A. et al., Analysis and minimization of cellular RNA editing by DNA adenine base editors. Sci Adv 5, eaax5717, doi:10.1126/sciadv.aax5717 (2019)) using a two-step PCR and barcoding method to prepare samples for sequencing using Illumina Miseq sequencers as above.

TABLE 24
HTS Primers used to amplify genomic sites

| Primer Name | Sequence |
|---|---|
| fwd_site_1 | ACACTCTTTCCCTACACGACGCTCTTCCGATCTNNNNCCAGCCCCATCTGTCAAACT |
| rev_site_1 | TGGAGTTCAGACGTGTGCTCTTCCGATCTTGAATGGATTCCTTGGAAACAATGA |
| fwd_site_2 | ACACTCTTTCCCTACACGACGCTCTTCCGATCTNNNNTGAGGGAGAGCCGTGTAGTT |
| rev_site_2 | TGGAGTTCAGACGTGTGCTCTTCCGATCTGCCTCTCAAAGTGCTGGGAT |
| fwd_site_3 | ACACTCTTTCCCTACACGACGCTCTTCCGATCTNNNNCCATCAGGCTCTCAGCTCAG |
| rev_site_3 | TGGAGTTCAGACGTGTGCTCTTCCGATCTCTCGTGGGTTTGTGGTTGC |
| fwd_site_4 | ACACTCTTTCCCTACACGACGCTCTTCCGATCTNNNNGCCCATTCCCTCTTTAGCCA |
| rev_site_4 | TGGAGTTCAGACGTGTGCTCTTCCGATCTGAGCCGTTCCCTCTTTGCTA |
| fwd_site_5 | ACACTCTTTCCCTACACGACGCTCTTCCGATCTNNNNAACCTGTGTGACACTTGGCA |
| rev_site_5 | TGGAGTTCAGACGTGTGCTCTTCCGATCTGTCTGGCCCAAGATCACACA |
| fwd_site_6 | ACACTCTTTCCCTACACGACGCTCTTCCGATCTNNNCACGGATAAAGACGCTGGGA |
| rev_site_6 | TGGAGTTCAGACGTGTGCTCTTCCGATCTGGGGTCCCAGGTGCTGAC |
| fwd_site_7 | ACACTCTTTCCCTACACGACGCTCTTCCGATCTNNNTTGATTGTCTCCTTTGCCGC |
| rev_site_7 | TGGAGTTCAGACGTGTGCTCTTCCGATCTTGACCCAGTGTTTGATAGATCAGT |
| fwd_site_8 | ACACTCTTTCCCTACACGACGCTCTTCCGATCTNNNCACCCCTTCAGTCCATGCTT |
| rev_site_8 | TGGAGTTCAGACGTGTGCTCTTCCGATCTTCTGATGGGGAGGAACGAGT |
| fwd_site_9 | ACACTCTTTCCCTACACGACGCTCTTCCGATCTNNNNCAGCTCAGCCTGAGTGTTGA |
| rev_site_9 | TGGAGTTCAGACGTGTGCTCTTCCGATCTGCCCACCCTAGTCATTGGAG |
| fwd_site_10 | ACACTCTTTCCCTACACGACGCTCTTCCGATCTNNNNGTCAGAGGGACACACTGTGG |
| rev_site_10 | TGGAGTTCAGACGTGTGCTCTTCCGATCTCACACTCACTCACCCACACA |
| fwd_site_11 | ACACTCTTTCCCTACACGACGCTCTTCCGATCTNNNNTGTGTGGGTGAGTGAGTGTG |
| rev_site_11 | TGGAGTTCAGACGTGTGCTCTTCCGATCTCACCAAGGTTCACAGCCTGA |
| fwd_site_12 | ACACTCTTTCCCTACACGACGCTCTTCCGATCTNNNNTTGTCTCTGCCTGTAGCTGC |
| rev_site_12 | TGGAGTTCAGACGTGTGCTCTTCCGATCTCGCTCTGGGCTTCATCTTCA |
| fwd_site_13 | ACACTCTTTCCCTACACGACGCTCTTCCGATCTNNNNTGGGATTATGGGTGTGAGCC |
| rev_site_13 | TGGAGTTCAGACGTGTGCTCTTCCGATCTTGCCTTCCTCCTCTCTCTCC |
| fwd_site_14 | ACACTCTTTCCCTACACGACGCTCTTCCGATCTNNNNTGCAGACCAGATTCGGAGAA |
| rev_site_14 | TGGAGTTCAGACGTGTGCTCTTCCGATCTGTTCAGTTTCCAGGGGGTCC |
| fwd_site_15 | ACACTCTTTCCCTACACGACGCTCTTCCGATCTNNNNTCCGCACAGCCTTAGTTCAA |
| rev_site_15 | TGGAGTTCAGACGTGTGCTCTTCCGATCTAACTTGAAGAGACGGCAGCA |
| fwd_site_16 | ACACTCTTTCCCTACACGACGCTCTTCCGATCTNNNNCCCCCAGCTACAGAAAGGTC |
| rev_site_16 | TGGAGTTCAGACGTGTGCTCTTCCGATCTATTTCCACCGCAAAATGGCC |
| fwd_site_17 | ACACTCTTTCCCTACACGACGCTCTTCCGATCTNNNNTCACTTCAGCCCAGGAGTAT |
| rev_site_17 | TGGAGTTCAGACGTGTGCTCTTCCGATCTTGTGTATGGTGAGAGGTAGGGA |
| fwd_site_18 | ACACTCTTTCCCTACACGACGCTCTTCCGATCTNNNNGTCTGAGGTCACACAGTGGG |
| rev_site_18 | TGGAGTTCAGACGTGTGCTCTTCCGATCTCTGAGAGCAGGGACCACATC |
| fwd_site_19 | ACACTCTTTCCCTACACGACGCTCTTCCGATCTNNNNGGGAGGTGGAGAGAGGATGT |
| rev_site_19 | TGGAGTTCAGACGTGTGCTCTTCCGATCTACTCTTCCTGAGGTCTAGGAACCCG |
| fwd_site_20 | ACACTCTTTCCCTACACGACGCTCTTCCGATCTNNNNCCCTGTTCCTAAAGCCCACC |
| rev_site_20 | TGGAGTTCAGACGTGTGCTCTTCCGATCTACTCTCTGGTTCTGTTTGTGGCCA |
| fwd_CTNNB1 | ACACTCTTTCCCTACACGACGCTCTTCCGATCTNNNNATTTGATGGAGTTGGACATGGCC |
| rev_CTNNB1 | TGGAGTTCAGACGTGTGCTCTCCAGCTACTTGTTCTTGAGTGAAGG |
| fwd_RSL1D1 | ACACTCTTTCCCTACACGACGCTCTTCCGATCTNNNNTGGCTTTCCAAATCAGTGGGTC |
| rev_RSL1D1 | TGGAGTTCAGACGTGTGCTCTTCCGATCTCTCATAAGCTTAGACCAACAAGC |
| fwd_IP90 | ACACTCTTTCCCTACACGACGCTCTTCCGATCTNNNNCTGGTTGACCAATCTGTGGTG |
| rev_IP90 | TGGAGTTCAGACGTGTGCTCTCTGCGTCTGGATCAGGTACG |
| fwd_HEK293_site2_off1 | ACACTCTTTCCCTACACGACGCTCTTCCGATCTNNNNGTGTGGAGAGTGAGTAAGCCA |
| rev_HEK293_site2_off1 | TGGAGTTCAGACGTGTGCTCTTCCGATCTACGGTAGGATGATTTCAGGCA |
| fwd_HEK293_site2_off2 | ACACTCTTTCCCTACACGACGCTCTTCCGATCTNNNNCACAAAGCAGTGTAGCTCAGG |
| rev_HEK293_site2_off2 | TGGAGTTCAGACGTGTGCTCTTCCGATCTTTTTTGGTACTCGAGTGTTATTCAG |
| fwd_HEK293_site3_off1 | ACACTCTTTCCCTACACGACGCTCTTCCGATCTNNNNTCCCCTGTTGACCTGGAGAA |
| rev_HEK293_site3_off1 | TGGAGTTCAGACGTGTGCTCTTCCGATCTCACTGTACTTGCCCTGACCA |
| fwd_HEK293_site3_off2 | ACACTCTTTCCCTACACGACGCTCTTCCGATCTNNNNTTGGTGTTGACAGGGAGCAA |
| rev_HEK293_site3_off2 | TGGAGTTCAGACGTGTGCTCTTCCGATCTCTGAGATGTGGGCAGAAGGG |
| fwd_HEK293_site3_offe | ACACTCTTTCCCTACACGACGCTCTTCCGATCTNNNNTGAGAGGGAACAGAAGGGCT |
| rev_HEK293_site3_offe | TGGAGTTCAGACGTGTGCTCTTCCGATCTGTCCAAAGGCCCAAGAACCT |
| fwd_HEK293_site3_off4 | ACACTCTTTCCCTACACGACGCTCTTCCGATCTNNNNTCCTAGCACTTTGGAAGGTCG |
| rev_HEK293_site3_off4 | TGGAGTTCAGACGTGTGCTCTTCCGATCTGCTCATCTTAATCTGCTCAGCC |
| fwd_HEK293_site3_off5 | ACACTCTTTCCCTACACGACGCTCTTCCGATCTNNNNAAAGGAGCAGCTCTTCCTGG |
| rev_HEK293_site3_off5 | TGGAGTTCAGACGTGTGCTCTTCCGATCTGTCTGCACCATCTCCCACAA |
| fwd_HEK293_site4_off1 | ACACTCTTTCCCTACACGACGCTCTTCCGATCTNNNNGGCATGGCTTCTGAGACTCA |
| rev_HEK293_site4_off1 | TGGAGTTCAGACGTGTGCTCTTCCGATCTGTCTCCCTTGCACTCCCTGTCTTT |
| fwd_HEK293_site4_off2 | ACACTCTTTCCCTACACGACGCTCTTCCGATCTNNNNTTTGGCAATGGAGGCATTGG |
| rev_HEK293_site4_off2 | TGGAGTTCAGACGTGTGCTCTTCCGATCTGAAGAGGCTGCCCATGAGAG |
| fwd_HEK293_site4_off3 | ACACTCTTTCCCTACACGACGCTCTTCCGATCTNNNNGGTCTGAGGCTCGAATCCTG |
| rev_HEK293_site4_off3 | TGGAGTTCAGACGTGTGCTCTTCCGATCTCTGTGGCCTCCATATCCCTG |
| fwd_HEK293_site4_off4 | ACACTCTTTCCCTACACGACGCTCTTCCGATCTNNNNTTTCCACCAGAACTCAGCCC |
| rev_HEK293_site4_off4 | TGGAGTTCAGACGTGTGCTCTTCCGATCTCCTCGGTTCCTCCACAACAC |
| fwd_HEK293_site4_off5 | ACACTCTTTCCCTACACGACGCTCTTCCGATCTNNNNCACGGGAAGGACAGGAGAAG |
| rev_HEK293_site4_off5 | TGGAGTTCAGACGTGTGCTCTTCCGATCTGCAGGGGAGGGATAAAGCAG |
| fwd_HEK_site_3 | ACACTCTTTCCCTACACGACGCTCTTCCGATCTNNNNGGAAACGCCCATGCAATTAGTC |
| rev_HEK_site_3 | TGGAGTTCAGACGTGTGCTCTTCCGATCTCTTGTCAACCAGTATCCCGGTG |
| fwd_HEK_site_2 | ACACTCTTTCCCTACACGACGCTCTTCCGATCTNNNNTGAATGGATTCCTTGGAAACAATG |
| rev_HEK_site_2 | TGGAGTTCAGACGTGTGCTCTTCCGATCTCCAGCCCCATCTGTCAAACT |
| fwd_HEK_site_4 | TGGAGTTCAGACGTGTGCTCTTCCGATCTTCCTTTCAACCCGAACGGAG |
| rev_HEK_site_4 | ACACTCTTTCCCTACACGACGCTCTTCCGATCTNNNNGCTGGTCTTCTTTCCCCTCC |
| fwd_LDLR | ACACTCTTTCCCTACACGACGCTCTTCCGATCTNNNNGCCCTGCTTCTTTTTCTCTGGT |
| rev_LDLR | TGGAGTTCAGACGTGTGCTCTTCCGATCTACCATTAACGCAGCCAACTTCA |
| fwd_TRAC | ACACTCTTTCCCTACACGACGCTCTTCCGATCTCATGAGGTCTATGGACTTCAAGAGCAA |
| Rev_TRAC | TGGAGTTCAGACGTGTGCTCTTCCGATCTCATCATTGACCAGAGCTCTGGGCAGAA |
| fwd_CBLB | ACACTCTTTCCCTACACGACGCTCTTCCGATCTGCACTTACCAGCATTACTTCCTAAACC |
| Rev_CBLB | TGGAGTTCAGACGTGTGCTCTTCCGATCTATGGGCTCCACTTTTCAGCTCTGTAA |
| fwd_CD7 | ACACTCTTTCCCTACACGACGCTCTTCCGATCTCAGTTCAGGCACATGTAGGAGGGA |
| Rev_CD7 | TGGAGTTCAGACGTGTGCTCTTCCGATCTACCGCCTGCAGCTGTCGGACACTGGCA |
| fwd_B2M | ACACTCTTTCCCTACACGACGCTCTTCCGATCTAAAAGATGAGTATGCCTGCCGTG |
| Rev_B2M | TGGAGTTCAGACGTGTGCTCTTCCGATCTCAGATTGTTTATATCAGATGGGATGGG |
| fwd_CIITA | ACACTCTTTCCCTACACGACGCTCTTCCGATCTATGCAAGTTTGGTCCTGAGCCCTCCC |
| Rev_CIITA | TGGAGTTCAGACGTGTGCTCTTCCGATCTGATGTGGGTTCCCTGCGCTCTGCA |
| fwd_PDCD1 | ACACTCTTTCCCTACACGACGCTCTTCCGATCTCCAGGGACTGAGGGTGGAAGGTCC |
| Rev_PDCD1 | TGGAGTTCAGACGTGTGCTCTTCCGATCTACCTCCGCCTGAGCAGTGGAGAA |

mRNA Production for ABE Editors Used in CD34+ Cells

[0775] Editors were cloned into a plasmid encoding a dT7 promoter followed by a 5′UTR, Kozak sequence, ORF, and 3′UTR. The dT7 promoter carries an inactivating point mutation within the T7 promoter that prevents transcription from circular plasmid. This plasmid templated a PCR reaction (Q5 Hot Start 2X Master Mix), in which the forward primer corrected the SNP within the T7 promoter and the reverse primer appended a 120A tail to the 3′ UTR. The resulting PCR product was purified on a Zymo Research 25 μg DCC column and used as mRNA template in the subsequent in vitro transcription. The NEB HiScribe High-Yield Kit was used as per the instruction manual but with full substitution of N1-methyl-pseudouridine for uridine and co-transcriptional capping with CleanCap AG (Trilink). Reaction cleanup was performed by lithium chloride precipitation. Primers used for amplification can be found in Table 25.

TABLE 25
Primers used for ABE8 T7 in vitro
transcription reactions

| Name | Sequence |
|---|---|
| fwd_IVT | TCGAGCTCGGTACCTAATACGACTCAC |
| rev_IVT | TTTTTTTTTTTTTTTTTTTTTTTTTTTTTTTTTTTTTTTT |
| | TTTTTTTTTTTTTTTTTTTTTTTTTTTTTTTTTTTTTTTT |
| | TTTTTTTTTTTTTTTTTTTTTTTTTTTTTTTTTTTTTTTT |
| | CTTCCTACTCAGGCTTTATTCAAAGACCA |

### CD34⁺ Cell Preparation

[0776] Mobilized peripheral blood was obtained and enriched for Human CD34+ HSPCs (HemaCare, M001F-GCSF/MOZ-2). The CD34+ cells were thawed and put into X-VIVO 10 (Lonza) containing 1% Glutamax (Gibco), 100 ng/mL of TPO (Peprotech), SCF (Peprotech) and Flt-3 (Peprotech) at 48 hours prior to electroporation

### Electroporation of CD34+ Cells

[0777] 48 hours post thaw, the cells were spun down to remove the X-VIVO 10 media and washed in MaxCyte buffer (HyClone) with 0.1% HSA (Akron Biotechnologies). The cells were then resuspended in cold MaxCyte buffer at 1,250,000 cells per mL and split into multiple 204 aliquots. The ABE mRNA (0.15 μIV) and −198 HBG1/2 sgRNA (4.05 μM) were then aliquoted as per the experimental conditions and raised to a total of 54 in MaxCyte buffer. The 204 of cells was the added into the 54 RNA mixture in groups of 3 and loaded into each chamber of an OC25×3 MaxCyte cuvette for electroporation. After receiving the charge, 25 μL was collected from the chambers and placed in the center of the wells in a 24-well untreated culture plate. The cells recovered for 20 minutes in an incubator (37° C., 5% CO₂). After the 20 minutes recovery, X-VIVO 10 containing 1% Glutamax, 100 ng/mL of TPO, SCF and Flt-3 was added to the cells for a concentration of 1,000,000 cells per mL. The cells were then left to further recover in an incubator (37° C., 5% CO₂) for 48 hrs.

### Erythrocyte Differentiation Post ABE Electroporation

[0778] Following 48 h post electroporation rest (day 0 of culture), the cells were spun down and moved to “Phase 1” IMDM media (ATCC) containing 5% human serum, 330 ng/mL transferrin (Sigma), 10 μg/mL human insulin (Sigma), 2U/mL heparin sodium (Sigma), 3U/mL EPO (Peprotech), 100 ng/mL SCF (Peprotech), 5 μg/mL IL3 and 50 μM hydrocortisone (Sigma) at 20,000 cells per mL. On day 4 of culture, the cells were fed 4× volume of the same media. On day 7, the cells were spun down and moved to “Phase 2” IMDM media containing 5% human serum (Sigma), 330 ng/mL transferrin, 10 μg/mL human insulin, 2U/mL heparin sodium, 3U/mL EPO and 100 ng/mL SCF at 200,000 cells per mL. On day 11, cells were spun down and moved to “Phase 3” IMDM media containing 5% human serum, 330 ng/mL of transferrin, 10 μg/mL human insulin, 2U/mL of heparin sodium and 3 U/mL of EPO at 1,000,000 cells per mL. On day 14, the cells were spun down and resuspended in the same media as day 11 but at 5,000,000 cells per mL. On day 18, the differentiated red blood cells were collected in 500,000 cell aliquots, washed once in 5004 DPBS (Gibco) and frozen at −80° C. for 24 hours before UHPLC processing.

### Genomic DNA Extraction for CD34+ Cells

[0779] Following ABE electroporation (48h later), an aliquot of cells was cultured in X-VIVO 10 media (Lonza) containing 1% Glutamax (Gibco), 100 ng/mL of TPO (Peprotech), SCF (Peprotech) and Flt-3 (Peprotech). Following 48 h and 144 h post culturing, 100,000 cells were collected and spun down. 50 μL of Quick Extract (Lucigen) was added to the cell pellet and the cell mixture was transferred to a 96-well PCR plate (Bio-Rad). The lysate was heated for 15 minutes at 65° C. followed by 10 minutes at 98° C. The cell lysates were stored at −20° C.

### Other Embodiments

[0780] From the foregoing description, it will be apparent that variations and modifications may be made to the invention described herein to adopt it to various usages and conditions. Such embodiments are also within the scope of the following claims.

[0781] The recitation of a listing of elements in any definition of a variable herein includes definitions of that variable as any single element or combination (or subcombination) of listed elements. The recitation of an embodiment herein includes that embodiment as any single embodiment or in combination with any other embodiments or portions thereof.

[0782] All patents and publications mentioned in this specification are herein incorporated by reference to the same extent as if each independent patent and publication was specifically and individually indicated to be incorporated by reference.

1. A method of producing a hematopoietic stem cell or progenitor thereof for the treatment of a hemoglobinopathy, hematologic cancer, or myeloproliferative disease, the method comprising:
(a) expressing in the hematopoietic stem cell or progenitor thereof a nucleobase editor polypeptide, wherein the nucleobase editor polypeptide comprises a nucleic acid programmable DNA binding protein (napDNAbp) and a deaminase; and
(b) contacting the hematopoietic stem cell or progenitor thereof with a guide RNA that targets a nucleic acid molecule encoding a cell surface protein selected from the group consisting of CD117, CXCR4, CD135, CD90, CD45, and CD34, and introducing a mutation in the cell surface protein.

2. (canceled)

3. The method of claim 1,
wherein the hemoglobinopathy is selected from the group consisting of sickle cell anemia, thalassemia, Fanconi anemia, aplastic anemia, and Wiskott-Aldrich syndrome;
wherein the hematologic cancer is selected from the group consisting of acute myeloid leukemia, acute lymphoid leukemia, chronic myeloid leukemia, chronic lymphoid leukemia, multiple myeloma, diffuse large B-cell lymphoma, and non-Hodgkin's lymphoma; and
wherein the myeloproliferative disease is a myelodysplastic syndrome.

4-5. (canceled)

6. A method of identifying a mutation that alters antibody binding to a cell surface protein, the method comprising
(a) expressing in a cell comprising a cell surface protein a nucleobase editor polypeptide, wherein the nucleobase editor polypeptide comprises a nucleic acid programmable DNA binding protein (napDNAbp) and a deaminase;
(b) contacting the cell with a guide RNA capable of targeting a nucleic acid molecule encoding the cell surface protein and introducing a mutation in the cell surface protein; and
(c) contacting the cell with an antibody that specifically binds a wild-type cell surface protein, but that exhibits reduced binding to the cell surface protein comprising the mutation, thereby identifying a mutation that alters antibody binding to the cell surface protein.

7. (canceled)

8. The method of claim 1, wherein the cell surface protein is selected from the group consisting of CD117, CXCR4, CD135, CD90, CD45, and CD34.

9. (canceled)

10. The method of claim 1, wherein the method further comprises contacting the cell with one or more additional guide RNAs that target a cell surface protein selected from the group consisting of CXCR4, CD135, CD90, CD45, and CD34.

11-13. (canceled)

14. A method of identifying a mutation that alters antibody binding to a cell surface protein, the method comprising
(a) expressing in a hematopoietic stem cell or progenitor thereof a nucleobase editor polypeptide, wherein the nucleobase editor polypeptide comprises a nucleic acid programmable DNA binding protein (napDNAbp) and a deaminase;
(b) contacting the cell with a guide RNA capable of targeting a nucleic acid molecule encoding a cell surface protein selected from the group consisting of CD117, CXCR4, CD135, CD90, CD45, CD34, and introducing a mutation in the cell surface protein; and
(c) contacting the cell with an antibody that specifically binds a wild-type cell surface protein, but that exhibits reduced binding to the cell surface protein comprising a mutation, thereby identifying a mutation that alters antibody binding to the cell surface protein.

15. A method of base editing a gene encoding a cell surface protein expressed by a hematopoietic stem cell or a progenitor thereof, the method comprising
(a) expressing in a hematopoietic stem cell or a progenitor thereof comprising a CD117 protein a nucleobase editor polypeptide, wherein the nucleobase editor polypeptide comprises a nucleic acid programmable DNA binding protein (napDNAbp) and a deaminase; and
(b) contacting the cell with a guide RNA capable of targeting a nucleic acid molecule encoding the CD117 protein, thereby base editing the gene encoding the cell surface protein.

16. The method of claim 1, wherein the deaminase domain is an adenosine deaminase or a cytidine deaminase.

17. The method of claim 16, wherein the adenosine deaminase is a TadA*8 variant.

18. The method of claim 17, wherein the adenosine deaminase is TadA*8.1, TadA*8.2, TadA*8.3, TadA*8.4, TadA*8.5, TadA*8.6, TadA*8.7, TadA*8.8, TadA*8.9, TadA*8.10, TadA*8.11, TadA*8.12, TadA*8.13, TadA*8.14, TadA*8.15, TadA*8.16, TadA*8.17, TadA*8.18, TadA*8.19, TadA*8.20, TadA*8.21, TadA*8.22, TadA*8.23, or TadA*8.24.

19-22. (canceled)

23. A method of conditioning a subject concurrent with or subsequent to a hematopoietic stem cell transplant (HSCT), the method comprising
(a) expressing in an isolated hematopoietic stem cell of the subject or of a donor a nucleobase editor polypeptide comprising a nucleic acid programmable DNA binding protein (napDNAbp) and a deaminase;
(b) contacting the hematopoietic stem cell with a guide RNA capable of targeting a nucleic acid molecule encoding a cell surface protein selected from the group consisting of CD117, CXCR4, CD135, CD90, CD45, and CD34, thereby introducing a mutation in the cell surface protein and generating an edited hematopoietic stem cell;
(c) administering the edited hematopoietic stem cell to the subject; and
(d) administering to the subject an antibody, antibody drug conjugate, or chimeric antigen receptor expressing T cell (CAR-T) that selectively binds a wild-type version of the cell surface protein, wherein the administering of step (d) is concurrent with or subsequent to step (c).

24. A method of conditioning a subject concurrent with or subsequent to a hematopoietic stem cell transplant (HSCT), the method comprising
(a) expressing in a hematopoietic stem cell of the subject a nucleobase editor polypeptide comprising a nucleic acid programmable DNA binding protein (napDNAbp) and a deaminase;
(b) contacting the hematopoietic stem cell with a guide RNA capable of targeting a nucleic acid molecule encoding a CD117 protein, thereby introducing a mutation in the CD117 protein and generating an edited hematopoietic stem cell;
(c) administering the edited hematopoietic stem cell to the subject; and
(d) administering to the subject an antibody, antibody drug conjugate, or chimeric antigen receptor expressing T cell (CAR-T) that selectively binds a wild-type version of CD117, wherein the administering of step (d) is concurrent with or subsequent to step (c).

25. The method of claim 23, wherein the deaminase domain is an adenosine deaminase or a cytidine deaminase.

26-33. (canceled)

34. The method of claim 1, wherein the CD117 cell surface protein comprising the mutation is capable of binding Stem Cell Factor (SCF) or is capable of SCF signaling.

35-36. (canceled)

37. The method of claim 36, wherein the single target nucleobase is a cytosine (C) and wherein the modification comprises conversion of the C to a thymine (T) or wherein the single target nucleobase is an adenosine (A) and wherein the modification comprises conversion of the A to a guanine (G).

38-40. (canceled)

41. The method of claim 1, wherein the at least one amino acid substitution in CD117 is selected from the group consisting of: T13A, I39V, H40R, D45G, D52G, E53G, I54V, R55G, T59A, K65E, K65R, T67A, E76G, N77G, N77S, N77Y, K78E, Q79R, N80G, E81G, E81D, N99G, K100G, H101R, L124P, Y125H, D129E, D129G, N130D, N130G, D131G, D131N, T132A, T144A, N145D, N145G, N145Y, N145S, Y146C, F162P, F162L, I163T, I163V, M171T, I172T, V195A, L196P, K199G, I201V, S220G, Y221C, Q256R, E257D, E257G, K258E, Y259C, T303A, T304A, M318V, T322A, V323A, F324L, K342G, K342R, Y350H, M351T, R353G, T354A, T354I, R381G, K383G, T385A, Y418C, D419G, R420G, I438M, D439G, Q460R, T461A, K484G, N486G, and T488A.

42-44. (canceled)

45. The method of claim 1, wherein the cell is from a subject having hemoglobinopathy, hematologic cancer, or a myeloproliferative disease.

46. The method of claim 45, wherein the cell is from a subject having sickle cell disease (SCD).

47. The method of claim 45, wherein the cell is from a subject having hereditary persistence of fetal hemoglobin (HPFH).

48-66. (canceled)

67. The method of claim 1, wherein the one or more guide polynucleotides comprises a nucleic acid sequence selected from Table 23.

68. The method of claim 1, wherein the one or more guide polynucleotides comprise a nucleic acid sequence that hybridizes to the complement of a CD117 target sequence selected from the group consisting of:
CAAGCTATCTTCTTAGGGA;
GCAAGCTATCTTCTTAGGGAA;
ACTTACGACAGGCTCGTGAA;
TGACCAATTATTCCCTCAAG;
AGTGACCAATTATTCCCTCA;
ACTACAGTATTTGTAAACGA;
AAGACAACGACACGCTGGTC;
and
GGCTGTTATGCACTGATCCG.

69-75. (canceled)

76. A base editor system comprising a fusion protein or a polynucleotide encoding the fusion protein, wherein the fusion protein comprises a nucleic acid programmable DNA binding protein (napDNAbp) and a deaminase domain, and a guide polynucleotide comprising a nucleic acid sequence selected from Table 23.

77-100. (canceled)

101. A polynucleotide encoding the base editor system of claim 76.

102. A cell produced by the method of claim 1.

103-109. (canceled)

110. A pharmaceutical composition comprising an effective amount of the cell of claim 102.

111. A method of treating a subject with a hemoglobinopathy, hematologic cancer, or myeloproliferative disease, the method comprising administering to the subject the pharmaceutical composition of claim 109.

112. A method of treating a subject with a hemoglobinopathy, hematologic cancer, or myeloproliferative disease, the method comprising administering to the subject a conditioning regimen comprising an antibody, antibody drug conjugate or chimeric antigen receptor expressing T-cell that selectively binds a cell surface protein and the cell of claim 102, thereby treating the hemoglobinopathy, hematologic cancer, or myeloproliferative disease.

113-121. (canceled)

122. A kit comprising the cell of claim 102.

123. (canceled)

The application's sequence listing, which the Patent Office published only in electronic form, follows.

SEQUENCE LISTING (737 sequences)

SEQ ID NO: 1 - DNA, 19 bp, Unknown
  Description of Unknown: target sequence
caagctatcttcttaggga

SEQ ID NO: 2 - DNA, 21 bp, Unknown
  Description of Unknown: target sequence
gcaagctatcttcttagggaa

SEQ ID NO: 3 - DNA, 20 bp, Unknown
  Description of Unknown: target sequence
acttacgacaggctcgtgaa

SEQ ID NO: 4 - DNA, 20 bp, Unknown
  Description of Unknown: target sequence
tgaccaattattccctcaag

SEQ ID NO: 5 - DNA, 20 bp, Unknown
  Description of Unknown: target sequence
agtgaccaattattccctca

SEQ ID NO: 6 - DNA, 20 bp, Unknown
  Description of Unknown: target sequence
actacagtatttgtaaacga

SEQ ID NO: 7 - DNA, 20 bp, Unknown
  Description of Unknown: target sequence
aagacaacgacacgctggtc

SEQ ID NO: 8 - DNA, 20 bp, Unknown
  Description of Unknown: target sequence
ggctgttatgcactgatccg

SEQ ID NO: 9 - DNA, 76 bp, Artificial Sequence
  Description of Artificial Sequence: Synthetic oligonucleotide
gttttagagctagaaatagcaagttaaaataaggctagtccgttatcaacttgaaaaagtggcaccgagtcggtgc

SEQ ID NO: 10 - protein, 167 aa, Unknown
  Description of Unknown: TadA sequence
MSEVEFSHEYWMRHALTLAKRAWDEREVPVGAVLVHNNRVIGEGWNRPIGRHDPTAHAEIMALRQGGLVMQNYRLIDATLYVTLEPCVMCAGAMIHSRIGRVVFGARDAKTGAAGSLMDVLHHPGMNHRVEITEGILADECAALLSDFFRMRRQEIKAQKKAQSSTD

SEQ ID NO: 11 - protein, 167 aa, Artificial Sequence
  Description of Artificial Sequence: Synthetic polypeptide
MSEVEFSHEYWMRHALTLAKRARDEREVPVGAVLVLNNRVIGEGWNRAIGLHDPTAHAEIMALRQGGLVMQNYRLIDATLYVTFEPCVMCAGAMIHSRIGRVVFGVRNAKTGAAGSLMDVLHYPGMNHRVEITEGILADECAALLCYFFRMPRQVFNAQKKAQSSTD

SEQ ID NO: 12 - protein, 167 aa, Artificial Sequence
  Description of Artificial Sequence: Synthetic polypeptide
MSEVEFSHEYWMRHALTLAKRARDEREVPVGAVLVLNNRVIGEGWNRAIGLHDPTAHAEIMALRQGGLVMQNYRLIDATLYVTFEPCVMCAGAMIHSRIGRVVFGVRNAKTGAAGSLMDVLHYPGMNHRVEITEGILADECAALLCTFFRMPRQVFNAQKKAQSSTD

SEQ ID NO: 13 - protein, 160 aa, Staphylococcus aureus
MGSHMTNDIYFMTLAIEEAKKAAQLGEVPIGAIITKDDEVIARAHNLRETLQQPTAHAEHIAIERAAKVLGSWRLEGCTLYVTLEPCVMCAGTIVMSRIPRVVYGADDPKGGCSGSLMNLLQQSNFNHRAIVDKGVLKEACSTLLTTFFKNLRANKKSTN

SEQ ID NO: 14 - protein, 161 aa, Bacillus subtilis
MTQDELYMKEAIKEAKKAEEKGEVPIGAVLVINGEIIARAHNLRETEQRSIAHAEMLVIDEACKALGTWRLEGATLYVTLEPCPMCAGAVVLSRVEKVVFGAFDPKGGCSGTLMNLLQEERFNHQAEVVSGVLEEECGGMLSAFFRELRKKKKAARKNLSE

SEQ ID NO: 15 - protein, 183 aa, Salmonella typhimurium
MPPAFITGVTSLSDVELDHEYWMRHALTLAKRAWDEREVPVGAVLVHNHRVIGEGWNRPIGRHDPTAHAEIMALRQGGLVLQNYRLLDTTLYVTLEPCVMCAGAMVHSRIGRVVFGARDAKTGAAGSLIDVLHHPGMNHRVEIIEGVLRDECATLLSDFFRMRRQEIKALKKADRAEGAGPAV

SEQ ID NO: 16 - protein, 164 aa, Shewanella putrefaciens
MDEYWMQVAMQMAEKAEAAGEVPVGAVLVKDGQQIATGYNLSISQHDPTAHAEILCLRSAGKKLENYRLLDATLYITLEPCAMCAGAMVHSRIARVVYGARDEKTGAAGTVVNLLQHPAFNHQVEVTSGVLAEACSAQLSRFFKRRRDEKKALKLAQRAQQGIE

SEQ ID NO: 17 - protein, 173 aa, Haemophilus influenzae
MDAAKVRSEFDEKMMRYALELADKAEALGEIPVGAVLVDDARNIIGEGWNLSIVQSDPTAHAEIIALRNGAKNIQNYRLLNSTLYVTLEPCTMCAGAILHSRIKRLVFGASDYKTGAIGSRFHFFDDYKMNHTLEITSGVLAEECSQKLSTFFQKRREEKKIEKALLKSLSDK

SEQ ID NO: 18 - protein, 161 aa, Caulobacter crescentus
MRTDESEDQDHRMMRLALDAARAAAEAGETPVGAVILDPSTGEVIATAGNGPIAAHDPTAHAEIAAMRAAAAKLGNYRLTDLTLVVTLEPCAMCAGAISHARIGRVVFGADDPKGGAVVHGPKFFAQPTCHWRPEVTGGVLADESADLLRGFFRARRKAKI

SEQ ID NO: 19 - protein, 179 aa, Geobacter sulfurreducens
MSSLKKTPIRDDAYWMGKAIREAAKAAARDEVPIGAVIVRDGAVIGRGHNLREGSNDPSAHAEMIAIRQAARRSANWRLTGATLYVTLEPCLMCMGAIILARLERVVFGCYDPKGGAAGSLYDLSADPRLNHQVRLSPGVCQEECGTMLSDFFRDLRRRKKAKATPALFIDERKVPPEP

SEQ ID NO: 20 - protein, 1410 aa, Artificial Sequence
  Description of Artificial Sequence: Synthetic polypeptide
EIGKATAKYFFYSNIMNFFKTEITLANGEIRKRPLIETNGETGEIVWDKGRDFATVRKVLSMPQVNIVKKTEVQTGGFSKESILPKRNSDKLIARKKDWDPKKYGGFMQPTVAYSVLVVAKVEKGKSKKLKSVKELLGITIMERSSFEKNPIDFLEAKGYKEVKKDLIIKLPKYSLFELENGRKRMLASAKFLQKGNELALPSKYVNFLYLASHYEKLKGSPEDNEQKQLFVEQHKHYLDEIIEQISEFSKRVILADANLDKVLSAYNKHRDKPIREQAENIIHLFTLTNLGAPRAFKYFDTTIARKEYRSTKEVLDATLIHQSITGLYETRIDLSQLGGDGGSGGSGGSGGSGGSGGSGGMDKKYSIGLAIGTNSVGWAVITDEYKVPSKKFKVLGNTDRHSIKKNLIGALLFDSGETAEATRLKRTARRRYTRRKNRICYLQEIFSNEMAKVDDSFFHRLEESFLVEEDKKHERHPIFGNIVDEVAYHEKYPTIYHLRKKLVDSTDKADLRLIYLALAHMIKFRGHFLIEGDLNPDNSDVDKLFIQLVQTYNQLFEENPINASGVDAKAILSARLSKSRRLENLIAQLPGEKKNGLFGNLIALSLGLTPNFKSNFDLAEDAKLQLSKDTYDDDLDNLLAQIGDQYADLFLAAKNLSDAILLSDILRVNTEITKAPLSASMIKRYDEHHQDLTLLKALVRQQLPEKYKEIFFDQSKNGYAGYIDGGASQEEFYKFIKPILEKMDGTEELLVKLNREDLLRKQRTFDNGSIPHQIHLGELHAILRRQEDFYPFLKDNREKIEKILTFRIPYYVGPLARGNSRFAWMTRKSEETITPWNFEEVVDKGASAQSFIERMTNFDKNLPNEKVLPKHSLLYEYFTVYNELTKVKYVTEGMRKPAFLSGEQKKAIVDLLFKTNRKVTVKQLKEDYFKKIECFDSVEISGVEDRFNASLGTYHDLLKIIKDKDFLDNEENEDILEDIVLTLTLFEDREMIEERLKTYAHLFDDKVMKQLKRRRYTGWGRLSRKLINGIRDKQSGKTILDFLKSDGFANRNFMQLIHDDSLTFKEDIQKAQVSGQGDSLHEHIANLAGSPAIKKGILQTVKVVDELVKVMGRHKPENIVIEMARENQTTQKGQKNSRERMKRIEEGIKELGSQILKEHPVENTQLQNEKLYLYYLQNGRDMYVDQELDINRLSDYDVDHIVPQSFLKDDSIDNKVLTRSDKNRGKSDNVPSEEVVKKMKNYWRQLLNAKLITQRKFDNLTKAERGGLSELDKAGFIKRQLVETRQITKHVAQILDSRMNTKYDENDKLIREVKVITLKSKLVSDFRKDFQFYKVREINNYHHAHDAYLNAVVGTALIKKYPKLESEFVYGDYKVYDVRKMIAKSEQEGADKRTADGSEFESPKKKRKV

SEQ ID NO: 21 - DNA, 8811 bp, Artificial Sequence
  Description of Artificial Sequence: Synthetic polynucleotide
atatgccaagtacgccccctattgacgtcaatgacggtaaatggcccgcctggcattatgcccagtacatgaccttatgggactttcctacttggcagtacatctacgtattagtcatcgctattaccatggtgatgcggttttggcagtacatcaatgggcgtggatagcggtttgactcacggggatttccaagtctccaccccattgacgtcaatgggagtttgttttggcaccaaaatcaacgggactttccaaaatgtcgtaacaactccgccccattgacgcaaatgggcggtaggcgtgtacggtgggaggtctatataagcagagctggtttagtgaaccgtcagatccgctagagatccgcggccgctaatacgactcactatagggagagccgccaccatgaaacggacagccgacggaagcgagttcgagtcaccaaagaagaagcggaaagtctctgaagtcgagtttagccacgagtattggatgaggcacgcactgaccctggcaaagcgagcatgggatgaaagagaagtccccgtgggcgccgtgctggtgcacaacaatagagtgatcggagagggatggaacaggccaatcggccgccacgaccctaccgcacacgcagagatcatggcactgaggcagggaggcctggtcatgcagaattaccgcctgatcgatgccaccctgtatgtgacactggagccatgcgtgatgtgcgcaggagcaatgatccacagcaggatcggaagagtggtgttcggagcacgggacgccaagaccggcgcagcaggctccctgatggatgtgctgcaccaccccggcatgaaccaccgggtggagatcacagagggaatcctggcagacgagtgcgccgccctgctgagcgatttctttagaatgcggagacaggagatcaaggcccagaagaaggcacagagctccaccgactctggaggatctagcggaggatcctctggaagcgagacaccaggcacaagcgagtccgccacaccagagagctccggcggctcctccggaggatcctctgaggtggagttttcccacgagtactggatgagacatgccctgaccctggccaagagggcacgcgatgagagggaggtgcctgtgggagccgtgctggtgctgaacaatagagtgatcggcgagggctggaacagagccatcggcctgcacgacccaacagcccatgccgaaattatggccctgagacagggcggcctggtcatgcagaactacagactgattgacgccaccctgtacgtgacattcgagccttgcgtgatgtgcgccggcgccatgatccactctaggatcggccgcgtggtgtttggcgtgaggaacgcaaaaaccggcgccgcaggctccctgatggacgtgctgcactaccccggcatgaatcaccgcgtcgaaattaccgagggaatcctggcagatgaatgtgccgccctgctgtgctatttctttcggatgcctagacaggtgttcaatgctcagaagaaggcccagagctccaccgactccggaggatctagcggaggctcctctggctctgagacacctggcacaagcgagagcgcaacacctgaaagcagcgggggcagcagcggggggtcagacaagaagtacagcatcggcctggccatcggcaccaactctgtgggctgggccgtgatcaccgacgagtacaaggtgcccagcaagaaattcaaggtgctgggcaacaccgaccggcacagcatcaagaagaacctgatcggagccctgctgttcgacagcggcgaaacagccgaggccacccggctgaagagaaccgccagaagaagatacaccagacggaagaaccggatctgctatctgcaagagatcttcagcaacgagatggccaaggtggacgacagcttcttccacagactggaagagtccttcctggtggaagaggataagaagcacgagcggcaccccatcttcggcaacatcgtggacgaggtggcctaccacgagaagtaccccaccatctaccacctgagaaagaaactggtggacagcaccgacaaggccgacctgcggctgatctatctggccctggcccacatgatcaagttccggggccacttcctgatcgagggcgacctgaaccccgacaacagcgacgtggacaagctgttcatccagctggtgcagacctacaaccagctgttcgaggaaaaccccatcaacgccagcggcgtggacgccaaggccatcctgtctgccagactgagcaagagcagacggctggaaaatctgatcgcccagctgcccggcgagaagaagaatggcctgttcggaaacctgattgccctgagcctgggcctgacccccaacttcaagagcaacttcgacctggccgaggatgccaaactgcagctgagcaaggacacctacgacgacgacctggacaacctgctggcccagatcggcgaccagtacgccgacctgtttctggccgccaagaacctgtccgacgccatcctgctgagcgacatcctgagagtgaacaccgagatcaccaaggcccccctgagcgcctctatgatcaagagatacgacgagcaccaccaggacctgaccctgctgaaagctctcgtgcggcagcagctgcctgagaagtacaaagagattttcttcgaccagagcaagaacggctacgccggctacattgacggcggagccagccaggaagagttctacaagttcatcaagcccatcctggaaaagatggacggcaccgaggaactgctcgtgaagctgaacagagaggacctgctgcggaagcagcggaccttcgacaacggcagcatcccccaccagatccacctgggagagctgcacgccattctgcggcggcaggaagatttttacccattcctgaaggacaaccgggaaaagatcgagaagatcctgaccttccgcatcccctactacgtgggccctctggccaggggaaacagcagattcgcctggatgaccagaaagagcgaggaaaccatcaccccctggaacttcgaggaagtggtggacaagggcgcttccgcccagagcttcatcgagcggatgaccaacttcgataagaacctgcccaacgagaaggtgctgcccaagcacagcctgctgtacgagtacttcaccgtgtataacgagctgaccaaagtgaaatacgtgaccgagggaatgagaaagcccgccttcctgagcggcgagcagaaaaaggccatcgtggacctgctgttcaagaccaaccggaaagtgaccgtgaagcagctgaaagaggactacttcaagaaaatcgagtgcttcgactccgtggaaatctccggcgtggaagatcggttcaacgcctccctgggcacataccacgatctgctgaaaattatcaaggacaaggacttcctggacaatgaggaaaacgaggacattctggaagatatcgtgctgaccctgacactgtttgaggacagagagatgatcgaggaacggctgaaaacctatgcccacctgttcgacgacaaagtgatgaagcagctgaagcggcggagatacaccggctggggcaggctgagccggaagctgatcaacggcatccgggacaagcagtccggcaagacaatcctggatttcctgaagtccgacggcttcgccaacagaaacttcatgcagctgatccacgacgacagcctgacctttaaagaggacatccagaaagcccaggtgtccggccagggcgatagcctgcacgagcacattgccaatctggccggcagccccgccattaagaagggcatcctgcagacagtgaaggtggtggacgagctcgtgaaagtgatgggccggcacaagcccgagaacatcgtgatcgaaatggccagagagaaccagaccacccagaagggacagaagaacagccgcgagagaatgaagcggatcgaagagggcatcaaagagctgggcagccagatcctgaaagaacaccccgtggaaaacacccagctgcagaacgagaagctgtacctgtactacctgcagaatgggcgggatatgtacgtggaccaggaactggacatcaaccggctgtccgactacgatgtggaccatatcgtgcctcagagctttctgaaggacgactccatcgacaacaaggtgctgaccagaagcgacaagaaccggggcaagagcgacaacgtgccctccgaagaggtcgtgaagaagatgaagaactactggcggcagctgctgaacgccaagctgattacccagagaaagttcgacaatctgaccaaggccgagagaggcggcctgagcgaactggataaggccggcttcatcaagagacagctggtggaaacccggcagatcacaaagcacgtggcacagatcctggactcccggatgaacactaagtacgacgagaatgacaagctgatccgggaagtgaaagtgatcaccctgaagtccaagctggtgtccgatttccggaaggatttccagttttacaaagtgcgcgagatcaacaactaccaccacgcccacgacgcctacctgaacgccgtcgtgggaaccgccctgatcaaaaagtaccctaagctggaaagcgagttcgtgtacggcgactacaaggtgtacgacgtgcggaagatgatcgccaagagcgagcaggaaatcggcaaggctaccgccaagtacttcttctacagcaacatcatgaactttttcaagaccgagattaccctggccaacggcgagatccggaagcggcctctgatcgagacaaacggcgaaaccggggagatcgtgtgggataagggccgggattttgccaccgtgcggaaagtgctgagcatgccccaagtgaatatcgtgaaaaagaccgaggtgcagacaggcggcttcagcaaagagtctatcctgcccaagaggaacagcgataagctgatcgccagaaagaaggactgggaccctaagaagtacggcggcttcgacagccccaccgtggcctattctgtgctggtggtggccaaagtggaaaagggcaagtccaagaaactgaagagtgtgaaagagctgctggggatcaccatcatggaaagaagcagcttcgagaagaatcccatcgactttctggaagccaagggctacaaagaagtgaaaaaggacctgatcatcaagctgcctaagtactccctgttcgagctggaaaacggccggaagagaatgctggcctctgccggcgaactgcagaagggaaacgaactggccctgccctccaaatatgtgaacttcctgtacctggccagccactatgagaagctgaagggctcccccgaggataatgagcagaaacagctgtttgtggaacagcacaagcactacctggacgagatcatcgagcagatcagcgagttctccaagagagtgatcctggccgacgctaatctggacaaagtgctgtccgcctacaacaagcaccgggataagcccatcagagagcaggccgagaatatcatccacctgtttaccctgaccaatctgggagcccctgccgccttcaagtactttgacaccaccatcgaccggaagaggtacaccagcaccaaagaggtgctggacgccaccctgatccaccagagcatcaccggcctgtacgagacacggatcgacctgtctcagctgggaggtgactctggcggctcaaaaagaaccgccgacggcagcgaattcgagcccaagaagaagaggaaagtctaaccggtcatcatcaccatcaccattgagtttaaacccgctgatcagcctcgactgtgccttctagttgccagccatctgttgtttgcccctcccccgtgccttccttgaccctggaaggtgccactcccactgtcctttcctaataaaatgaggaaattgcatcgcattgtctgagtaggtgtcattctattctggggggtggggtggggcaggacagcaagggggaggattgggaagacaatagcaggcatgctggggatgcggtgggctctatggcttctgaggcggaaagaaccagctggggctcgataccgtcgacctctagctagagcttggcgtaatcatggtcatagctgtttcctgtgtgaaattgttatccgctcacaattccacacaacatacgagccggaagcataaagtgtaaagcctagggtgcctaatgagtgagctaactcacattaattgcgttgcgctcactgcccgctttccagtcgggaaacctgtcgtgccagctgcattaatgaatcggccaacgcgcggggagaggcggtttgcgtattgggcgctcttccgcttcctcgctcactgactcgctgcgctcggtcgttcggctgcggcgagcggtatcagctcactcaaaggcggtaatacggttatccacagaatcaggggataacgcaggaaagaacatgtgagcaaaaggccagcaaaaggccaggaaccgtaaaaaggccgcgttgctggcgtttttccataggctccgcccccctgacgagcatcacaaaaatcgacgctcaagtcagaggtggcgaaacccgacaggactataaagataccaggcgtttccccctggaagctccctcgtgcgctctcctgttccgaccctgccgcttaccggatacctgtccgcctttctcccttcgggaagcgtggcgctttctcatagctcacgctgtaggtatctcagttcggtgtaggtcgttcgctccaagctgggctgtgtgcacgaaccccccgttcagcccgaccgctgcgccttatccggtaactatcgtcttgagtccaacccggtaagacacgacttatcgccactggcagcagccactggtaacaggattagcagagcgaggtatgtaggcggtgctacagagttcttgaagtggtggcctaactacggctacactagaagaacagtatttggtatctgcgctctgctgaagccagttaccttcggaaaaagagttggtagctcttgatccggcaaacaaaccaccgctggtagcggtggtttttttgtttgcaagcagcagattacgcgcagaaaaaaaggatctcaagaagatcctttgatcttttctacggggtctgacactcagtggaacgaaaactcacgttaagggattttggtcatgagattatcaaaaaggatcttcacctagatccttttaaattaaaaatgaagttttaaatcaatctaaagtatatatgagtaaacttggtctgacagttaccaatgcttaatcagtgaggcacctatctcagcgatctgtctatttcgttcatccatagttgcctgactccccgtcgtgtagataactacgatacgggagggcttaccatctggccccagtgctgcaatgataccgcgagacccacgctcaccggctccagatttatcagcaataaaccagccagccggaagggccgagcgcagaagtggtcctgcaactttatccgcctccatccagtctattaattgttgccgggaagctagagtaagtagttcgccagttaatagtttgcgcaacgttgttgccattgctacaggcatcgtggtgtcacgctcgtcgtttggtatggcttcattcagctccggttcccaacgatcaaggcgagttacatgatcccccatgttgtgcaaaaaagcggttagctccttcggtcctccgatcgttgtcagaagtaagttggccgcagtgttatcactcatggttatggcagcactgcataattctcttactgtcatgccatccgtaagatgcttttctgtgactggtgagtactcaaccaagtcattctgagaatagtgtatgcggcgaccgagttgctcttgcccggcgtcaatacgggataataccgcgccacatagcagaactttaaaagtgctcatcattggaaaacgttcttcggggcgaaaactctcaaggatcttaccgctgttgagatccagttcgatgtaacccactcgtgcacccaactgatcttcagcatcttttactttcaccagcgtttctgggtgagcaaaaacaggaaggcaaaatgccgcaaaaaagggaataagggcgacacggaaatgttgaatactcatactcttcctttttcaatattattgaagcatttatcagggttattgtctcatgagcggatacatatttgaatgtatttagaaaaataaacaaataggggttccgcgcacatttccccgaaaagtgccacctgacgtcgacggatcgggagatcgatctcccgatcccctagggtcgactctcagtacaatctgctctgatgccgcatagttaagccagtatctgctccctgcttgtgtgttggaggtcgctgagtagtgcgcgagcaaaatttaagctacaacaaggcaaggcttgaccgacaattgcatgaagaatctgcttagggttaggcgttttgcgctgcttcgcgatgtacgggccagatatacgcgttgacattgattattgactagttattaatagtaatcaattacggggtcattagttcatagcccatatatggagttccgcgttacataacttacggtaaatggcccgcctggctgaccgcccaacgacccccgcccattgacgtcaataatgacgtatgttcccatagtaacgccaatagggactttccattgacgtcaatgggtggagtatttacggtaaactgcccacttggcagtacatcaagtgtatc

SEQ ID NO: 22 - DNA, 8877 bp, Artificial Sequence
  Description of Artificial Sequence: Synthetic polynucleotide
atatgccaagtacgccccctattgacgtcaatgacggtaaatggcccgcctggcattatgcccagtacatgaccttatgggactttcctacttggcagtacatctacgtattagtcatcgctattaccatggtgatgcggttttggcagtacatcaatgggcgtggatagcggtttgactcacggggatttccaagtctccaccccattgacgtcaatgggagtttgttttggcaccaaaatcaacgggactttccaaaatgtcgtaacaactccgccccattgacgcaaatgggcggtaggcgtgtacggtgggaggtctatataagcagagctggtttagtgaaccgtcagatccgctagagatccgcggccgctaatacgactcactatagggagagccgccaccatgagctcagagactggcccagtggctgtggaccccacattgagacggcggatcgagccccatgagtttgaggtattcttcgatccgagagagctccgcaaggagacctgcctgctttacgaaattaattgggggggccggcactccatttggcgacatacatcacagaacactaacaagcacgtcgaagtcaacttcatcgagaagttcacgacagaaagatatttctgtccgaacacaaggtgcagcattacctggtttctcagctggagcccatgcggcgaatgtagtagggccatcactgaattcctgtcaaggtatccccacgtcactctgtttatttacatcgcaaggctgtaccaccacgctgacccccgcaatcgacaaggcctgcgggatttgatctcttcaggtgtgactatccaaattatgactgagcaggagtcaggatactgctggagaaactttgtgaattatagcccgagtaatgaagcccactggcctaggtatccccatctgtgggtacgactgtacgttcttgaactgtactgcatcatactgggcctgcctccttgtctcaacattctgagaaggaagcagccacagctgacattctttaccatcgctcttcagtcttgtcattaccagcgactgcccccacacattctctgggccaccgggttgaaatctggtggttcttctggtggttctagcggcagcgagactcccgggacctcagagtccgccacacccgaaagttctggtggttcttctggtggttctgataaaaagtattctattggtttagccatcggcactaattccgttggatgggctgtcataaccgatgaatacaaagtaccttcaaagaaatttaaggtgttggggaacacagaccgtcattcgattaaaaagaatcttatcggtgccctcctattcgatagtggcgaaacggcagaggcgactcgcctgaaacgaaccgctcggagaaggtatacacgtcgcaagaaccgaatatgttacttacaagaaatttttagcaatgagatggccaaagttgacgattctttctttcaccgtttggaagagtccttccttgtcgaagaggacaagaaacatgaacggcaccccatctttggaaacatagtagatgaggtggcatatcatgaaaagtacccaacgatttatcacctcagaaaaaagctagttgactcaactgataaagcggacctgaggttaatctacttggctcttgcccatatgataaagttccgtgggcactttctcattgagggtgatctaaatccggacaactcggatgtcgacaaactgttcatccagttagtacaaacctataatcagttgtttgaagagaaccctataaatgcaagtggcgtggatgcgaaggctattcttagcgcccgcctctctaaatcccgacggctagaaaacctgatcgcacaattacccggagagaagaaaaatgggttgttcggtaaccttatagcgctctcactaggcctgacaccaaattttaagtcgaacttcgacttagctgaagatgccaaattgcagcttagtaaggacacgtacgatgacgatctcgacaatctactggcacaaattggagatcagtatgcggacttatttttggctgccaaaaaccttagcgatgcaatcctcctatctgacatactgagagttaatactgagattaccaaggcgccgttatccgcttcaatgatcaaaaggtacgatgaacatcaccaagacttgacacttctcaaggccctagtccgtcagcaactgcctgagaaatataaggaaatattctttgatcagtcgaaaaacgggtacgcaggttatattgacggcggagcgagtcaagaggaattctacaagtttatcaaacccatattagagaagatggatgggacggaagagttgcttgtaaaactcaatcgcgaagatctactgcgaaagcagcggactttcgacaacggtagcattccacatcaaatccacttaggcgaattgcatgctatacttagaaggcaggaggatttttatccgttcctcaaagacaatcgtgaaaagattgagaaaatcctaacctttcgcataccttactatgtgggacccctggcccgagggaactctcggttcgcatggatgacaagaaagtccgaagaaacgattactccatggaattttgaggaagttgtcgataaaggtgcgtcagctcaatcgttcatcgagaggatgaccaactttgacaagaatttaccgaacgaaaaagtattgcctaagcacagtttactttacgagtatttcacagtgtacaatgaactcacgaaagttaagtatgtcactgagggcatgcgtaaacccgcctttctaagcggagaacagaagaaagcaatagtagatctgttattcaagaccaaccgcaaagtgacagttaagcaattgaaagaggactactttaagaaaattgaatgcttcgattctgtcgagatctccggggtagaagatcgatttaatgcgtcacttggtacgtatcatgacctcctaaagataattaaagataaggacttcctggataacgaagagaatgaagatatcttagaagatatagtgttgactcttaccctctttgaagatcgggaaatgattgaggaaagactaaaaacatacgctcacctgttcgacgataaggttatgaaacagttaaagaggcgtcgctatacgggctggggacgattgtcgcggaaacttatcaacgggataagagacaagcaaagtggtaaaactattctcgattttctaaagagcgacggcttcgccaataggaactttatgcagctgatccatgatgactctttaaccttcaaagaggatatacaaaaggcacaggtttccggacaaggggactcattgcacgaacatattgcgaatcttgctggttcgccagccatcaaaaagggcatactccagacagtcaaagtagtggatgagctagttaaggtcatgggacgtcacaaaccggaaaacattgtaatcgagatggcacgcgaaaatcaaacgactcagaaggggcaaaaaaacagtcgagagcggatgaagagaatagaagagggtattaaagaactgggcagccagatcttaaaggagcatcctgtggaaaatacccaattgcagaacgagaaactttacctctattacctacaaaatggaagggacatgtatgttgatcaggaactggacataaaccgtttatctgattacgacgtcgatcacattgtaccccaatcctttttgaaggacgattcaatcgacaataaagtgcttacacgctcggataagaaccgagggaaaagtgacaatgttccaagcgaggaagtcgtaaagaaaatgaagaactattggcggcagctcctaaatgcgaaactgataacgcaaagaaagttcgataacttaactaaagctgagaggggtggcttgtctgaacttgacaaggccggatttattaaacgtcagctcgtggaaacccgccaaatcacaaagcatgttgcacagatactagattcccgaatgaatacgaaatacgacgagaacgataagctgattcgggaagtcaaagtaatcactttaaagtcaaaattggtgtcggacttcagaaaggattttcaattctataaagttagggagataaataactaccaccatgcgcacgacgcttatcttaatgccgtcgtagggaccgcactcattaagaaatacccgaagctagaaagtgagtttgtgtatggtgattacaaagtttatgacgtccgtaagatgatcgcgaaaagcgaacaggagataggcaaggctacagccaaatacttcttttattctaacattatgaatttctttaagacggaaatcactctggcaaacggagagatacgcaaacgacctttaattgaaaccaatggggagacaggtgaaatcgtatgggataagggccgggacttcgcgacggtgagaaaagttttgtccatgccccaagtcaacatagtaaagaaaactgaggtgcagaccggagggttttcaaaggaatcgattcttccaaaaaggaatagtgataagctcatcgctcgtaaaaaggactgggacccgaaaaagtacggtggcttcgatagccctacagttgcctattctgtcctagtagtggcaaaagttgagaagggaaaatccaagaaactgaagtcagtcaaagaattattggggataacgattatggagcgctcgtcttttgaaaagaaccccatcgacttccttgaggcgaaaggttacaaggaagtaaaaaaggatctcataattaaactaccaaagtatagtctgtttgagttagaaaatggccgaaaacggatgttggctagcgccggagagcttcaaaaggggaacgaactcgcactaccgtctaaatacgtgaatttcctgtatttagcgtcccattacgagaagttgaaaggttcacctgaagataacgaacagaagcaactttttgttgagcagcacaaacattatctcgacgaaatcatagagcaaatttcggaattcagtaagagagtcatcctagctgatgccaatctggacaaagtattaagcgcatacaacaagcacagggataaacccatacgtgagcaggcggaaaatattatccatttgtttactcttaccaacctcggcgctccagccgcattcaagtattttgacacaacgatagatcgcaaacgatacacttctaccaaggaggtgctagacgcgacactgattcaccaatccatcacgggattatatgaaactcggatagatttgtcacagcttgggggtgactctggtggttctggaggatctggtggttctactaatctgtcagatattattgaaaaggagaccggtaagcaactggttatccaggaatccatcctcatgctcccagaggaggtggaagaagtcattgggaacaagccggaaagcgatatactcgtgcacaccgcctacgacgagagcaccgacgagaatgtcatgcttctgactagcgacgcccctgaatacaagccttgggctctggtcatacaggatagcaacggtgagaacaagattaagatgctctctggtggttctggaggatctggtggttctactaatctgtcagatattattgaaaaggagaccggtaagcaactggttatccaggaatccatcctcatgctcccagaggaggtggaagaagtcattgggaacaagccggaaagcgatatactcgtgcacaccgcctacgacgagagcaccgacgagaatgtcatgcttctgactagcgacgcccctgaatacaagccttgggctctggtcatacaggatagcaacggtgagaacaagattaagatgctctctggtggttctcccaagaagaagaggaaagtctaaccggtcatcatcaccatcaccattgagtttaaacccgctgatcagcctcgactgtgccttctagttgccagccatctgttgtttgcccctcccccgtgccttccttgaccctggaaggtgccactcccactgtcctttcctaataaaatgaggaaattgcatcgcattgtctgagtaggtgtcattctattctggggggtggggtggggcaggacagcaagggggaggattgggaagacaatagcaggcatgctggggatgcggtgggctctatggcttctgaggcggaaagaaccagctggggctcgataccgtcgacctctagctagagcttggcgtaatcatggtcatagctgtttcctgtgtgaaattgttatccgctcacaattccacacaacatacgagccggaagcataaagtgtaaagcctagggtgcctaatgagtgagctaactcacattaattgcgttgcgctcactgcccgctttccagtcgggaaacctgtcgtgccagctgcattaatgaatcggccaacgcgcggggagaggcggtttgcgtattgggcgctcttccgcttcctcgctcactgactcgctgcgctcggtcgttcggctgcggcgagcggtatcagctcactcaaaggcggtaatacggttatccacagaatcaggggataacgcaggaaagaacatgtgagcaaaaggccagcaaaaggccaggaaccgtaaaaaggccgcgttgctggcgtttttccataggctccgcccccctgacgagcatcacaaaaatcgacgctcaagtcagaggtggcgaaacccgacaggactataaagataccaggcgtttccccctggaagctccctcgtgcgctctcctgttccgaccctgccgcttaccggatacctgtccgcctttctcccttcgggaagcgtggcgctttctcatagctcacgctgtaggtatctcagttcggtgtaggtcgttcgctccaagctgggctgtgtgcacgaaccccccgttcagcccgaccgctgcgccttatccggtaactatcgtcttgagtccaacccggtaagacacgacttatcgccactggcagcagccactggtaacaggattagcagagcgaggtatgtaggcggtgctacagagttcttgaagtggtggcctaactacggctacactagaagaacagtatttggtatctgcgctctgctgaagccagttaccttcggaaaaagagttggtagctcttgatccggcaaacaaaccaccgctggtagcggtggtttttttgtttgcaagcagcagattacgcgcagaaaaaaaggatctcaagaagatcctttgatcttttctacggggtctgacgctcagtggaacgaaaactcacgttaagggattttggtcatgagattatcaaaaaggatcttcacctagatccttttaaattaaaaatgaagttttaaatcaatctaaagtatatatgagtaaacttggtctgacagttaccaatgcttaatcagtgaggcacctatctcagcgatctgtctatttcgttcatccatagttgcctgactccccgtcgtgtagataactacgatacgggagggcttaccatctggccccagtgctgcaatgataccgcgagacccacgctcaccggctccagatttatcagcaataaaccagccagccggaagggccgagcgcagaagtggtcctgcaactttatccgcctccatccagtctattaattgttgccgggaagctagagtaagtagttcgccagttaatagtttgcgcaacgttgttgccattgctacaggcatcgtggtgtcacgctcgtcgtttggtatggcttcattcagctccggttcccaacgatcaaggcgagttacatgatcccccatgttgtgcaaaaaagcggttagctccttcggtcctccgatcgttgtcagaagtaagttggccgcagtgttatcactcatggttatggcagcactgcataattctcttactgtcatgccatccgtaagatgcttttctgtgactggtgagtactcaaccaagtcattctgagaatagtgtatgcggcgaccgagttgctcttgcccggcgtcaatacgggataataccgcgccacatagcagaactttaaaagtgctcatcattggaaaacgttcttcggggcgaaaactctcaaggatcttaccgctgttgagatccagttcgatgtaacccactcgtgcacccaactgatcttcagcatcttttactttcaccagcgtttctgggtgagcaaaaacaggaaggcaaaatgccgcaaaaaagggaataagggcgacacggaaatgttgaatactcatactcttcctttttcaatattattgaagcatttatcagggttattgtctcatgagcggatacatatttgaatgtatttagaaaaataaacaaataggggttccgcgcacatttccccgaaaagtgccacctgacgtcgacggatcgggagatcgatctcccgatcccctagggtcgactctcagtacaatctgctctgatgccgcatagttaagccagtatctgctccctgcttgtgtgttggaggtcgctgagtagtgcgcgagcaaaatttaagctacaacaaggcaaggcttgaccgacaattgcatgaagaatctgcttagggttaggcgttttgcgctgcttcgcgatgtacgggccagatatacgcgttgacattgattattgactagttattaatagtaatcaattacggggtcattagttcatagcccatatatggagttccgcgttacataacttacggtaaatggcccgcctggctgaccgcccaacgacccccgcccattgacgtcaataatgacgtatgttcccatagtaacgccaatagggactttccattgacgtcaatgggtggagtatttacggtaaactgcccacttggcagtacatcaagtgtatc

SEQ ID NO: 23 - DNA, 5508 bp, Artificial Sequence
  Description of Artificial Sequence: Synthetic polynucleotide
atgagctcagagactggcccagtggctgtggaccccacattgagacggcggatcgagccccatgagtttgaggtattcttcgatccgagagagctccgcaaggagacctgcctgctttacgaaattaattgggggggccggcactccatttggcgacatacatcacagaacactaacaagcacgtcgaagtcaacttcatcgagaagttcacgacagaaagatatttctgtccgaacacaaggtgcagcattacctggtttctcagctggagccgcgaatgtagtagggccatcactgaattcctgtcaaggtatccccacgtcactctgtttatttacatcgcaaggctgtaccaccacgctgacccccgcaatcgacaaggcctgcgggatttgatctcttcaggtgtgactatccaaattatgactgagcaggagtcaggatactgctggagaaactttgtgaattatagcccgagtaatgaagcccactggcctaggtatccccatctgtgggtacgactgtacgttcttgaactgtactgcatcatactgggcctgcctccttgtctcaacattctgagaaggaagcagccacagctgacattctttaccatcgctcttcagtcttgtcattaccagcgactgcccccacacattctctgggccaccgggttgaaatctggtggttcttctggtggttctagcggcagcgagactcccgggacctcagagtccgccacacccgaaagttctggtggttcttctggtggttctgataaaaagtattctattggtttagccatcggcactaattccgttggatgggctgtcataaccgatgaatacaaagtaccttcaaagaaatttaaggtgttggggaacacagaccgtcattcgattaaaaagaatcttatcggtgccctcctattcgatagtggcgaaacggcagaggcgactcgcctgaaacgaaccgctcggagaaggtatacacgtcgcaagaaccgaatatgttacttacaagaaatttttagcaatgagatggccaaagttgacgattctttctttcaccgtttggaagagtccttccttgtcgaagaggacaagaaacatgaacggcaccccatctttggaaacatagtagatgaggtggcatatcatgaaaagtacccaacgatttatcacctcagaaaaaagctagttgactcaactgataaagcggacctgaggttaatctacttggctcttgcccatatgataaagttccgtgggcactttctcattgagggtgatctaaatccggacaactcggatgtcgacaaactgttcatccagttagtacaaacctataatcagttgtttgaagagaaccctataaatgcaagtggcgtggatgcgaaggctattcttagcgcccgcctctctaaatcccgacggctagaaaacctgatcgcacaattacccggagagaagaaaaatgggttgttcggtaaccttatagcgctctcactaggcctgacaccaaattttaagtcgaacttcgacttagctgaagatgccaaattgcagcttagtaaggacacgtacgatgacgatctcgacaatctactggcacaaattggagatcagtatgcggacttatttttggctgccaaaaaccttagcgatgcaatcctcctatctgacatactgagagttaatactgagattaccaaggcgccgttatccgcttcaatgatcaaaaggtacgatgaacatcaccaagacttgacacttctcaaggccctagtccgtcagcaactgcctgagaaatataaggaaatattctttgatcagtcgaaaaacgggtacgcaggttatattgacggcggagcgagtcaagaggaattctacaagtttatcaaacccatattagagaagatggatgggacggaagagttgcttgtaaaactcaatcgcgaagatctactgcgaaagcagcggactttcgacaacggtagcattccacatcaaatccacttaggcgaattgcatgctatacttagaaggcaggaggatttttatccgttcctcaaagacaatcgtgaaaagattgagaaaatcctaacctttcgcataccttactatgtgggacccctggcccgagggaactctcggttcgcatggatgacaagaaagtccgaagaaacgattactccatggaattttgaggaagttgtcgataaaggtgcgtcagctcaatcgttcatcgagaggatgaccaactttgacaagaatttaccgaacgaaaaagtattgcctaagcacagtttactttacgagtatttcacagtgtacaatgaactcacgaaagttaagtatgtcactgagggcatgcgtaaacccgcctttctaagcggagaacagaagaaagcaatagtagatctgttattcaagaccaaccgcaaagtgacagttaagcaattgaaagaggactactttaagaaaattgaatgcttcgattctgtcgagatctccggggtagaagatcgatttaatgcgtcacttggtacgtatcatgacctcctaaagataattaaagataaggacttcctggataacgaagagaatgaagatatcttagaagatatagtgttgactcttaccctctttgaagatcgggaaatgattgaggaaagactaaaaacatacgctcacctgttcgacgataaggttatgaaacagttaaagaggcgtcgctatacgggctggggacgattgtcgcggaaacttatcaacgggataagagacaagcaaagtggtaaaactattctcgattttctaaagagcgacggcttcgccaataggaactttatgcagctgatccatgatgactctttaaccttcaaagaggatatacaaaaggcacaggtttccggacaaggggactcattgcacgaacatattgcgaatcttgctggttcgccagccatcaaaaagggcatactccagacagtcaaagtagtggatgagctagttaaggtcatgggacgtcacaaaccggaaaacattgtaatcgagatggcacgcgaaaatcaaacgactcagaaggggcaaaaaaacagtcgagagcggatgaagagaatagaagagggtattaaagaactgggcagccagatcttaaaggagcatcctgtggaaaatacccaattgcagaacgagaaactttacctctattacctacaaaatggaagggacatgtatgttgatcaggaactggacataaaccgtttatctgattacgacgtcgatcacattgtaccccaatcctttttgaaggacgattcaatcgacaataaagtgcttacacgctcggataagaaccgagggaaaagtgacaatgttccaagcgaggaagtcgtaaagaaaatgaagaactattggcggcagctcctaaatgcgaaactgataacgcaaagaaagttcgataacttaactaaagctgagaggggtggcttgtctgaacttgacaaggccggatttattaaacgtcagctcgtggaaacccgccaaatcacaaagcatgttgcacagatactagattcccgaatgaatacgaaatacgacgagaacgataagctgattcgggaagtcaaagtaatcactttaaagtcaaaattggtgtcggacttcagaaaggattttcaattctataaagttagggagataaataactaccaccatgcgcacgacgcttatcttaatgccgtcgtagggaccgcactcattaagaaatacccgaagctagaaagtgagtttgtgtatggtgattacaaagtttatgacgtccgtaagatgatcgcgaaaagcgaacaggagataggcaaggctacagccaaatacttcttttattctaacattatgaatttctttaagacggaaatcactctggcaaacggagagatacgcaaacgacctttaattgaaaccaatggggagacaggtgaaatcgtatgggataagggccgggacttcgcgacggtgagaaaagttttgtccatgccccaagtcaacatagtaaagaaaactgaggtgcagaccggagggttttcaaaggaatcgattcttccaaaaaggaatagtgataagctcatcgctcgtaaaaaggactgggacccgaaaaagtacggtggcttcgatagccctacagttgcctattctgtcctagtagtggcaaaagttgagaagggaaaatccaagaaactgaagtcagtcaaagaattattggggataacgattatggagcgctcgtcttttgaaaagaaccccatcgacttccttgaggcgaaaggttacaaggaagtaaaaaaggatctcataattaaactaccaaagtatagtctgtttgagttagaaaatggccgaaaacggatgttggctagcgccggagagcttcaaaaggggaacgaactcgcactaccgtctaaatacgtgaatttcctgtatttagcgtcccattacgagaagttgaaaggttcacctgaagataacgaacagaagcaactttttgttgagcagcacaaacattatctcgacgaaatcatagagcaaatttcggaattcagtaagagagtcatcctagctgatgccaatctggacaaagtattaagcgcatacaacaagcacagggataaacccatacgtgagcaggcggaaaatattatccatttgtttactcttaccaacctcggcgctccagccgcattcaagtattttgacacaacgatagatcgcaaacgatacacttctaccaaggaggtgctagacgcgacactgattcaccaatccatcacgggattatatgaaactcggatagatttgtcacagcttgggggtgactctggtggttctggaggatctggtggttctactaatctgtcagatattattgaaaaggagaccggtaagcaactggttatccaggaatccatcctcatgctcccagaggaggtggaagaagtcattgggaacaagccggaaagcgatatactcgtgcacaccgcctacgacgagagcaccgacgagaatgtcatgcttctgactagcgacgcccctgaatacaagccttgggctctggtcatacaggatagcaacggtgagaacaagattaagatgctctctggtggttctggaggatctggtggttctactaatctgtcagatattattgaaaaggagaccggtaagcaactggttatccaggaatccatcctcatgctcccagaggaggtggaagaagtcattgggaacaagccggaaagcgatatactcgtgcacaccgcctacgacgagagcaccgacgagaatgtcatgcttctgactagcgacgcccctgaatacaagccttgggctctggtcatacaggatagcaacggtgagaacaagattaagatgctctctggtggttctaaaaggacggcggacggatcagagttcgagagtccgaaaaaaaaacgaaaggtcgaataa

SEQ ID NO: 24 - DNA, 5514 bp, Artificial Sequence
  Description of Artificial Sequence: Synthetic polynucleotide
atgtcatccgaaaccgggccagtggccgtagacccaacactcaggaggcggatagaaccccatgagtttgaagtgttcttcgaccccagagagctgcgcaaagagacttgcctcctgtatgaaataaattgggggggtcgccattcaatttggaggcacactagccagaatactaacaaacacgtggaggtaaattttatcgagaagtttaccaccgaaagatacttttgccccaatacacggtgttcaattacctggtttctgtcatggagtccatgtggagaatgtagtagagcgataactgagttcctgtctcgatatcctcacgtcacgttgtttatatacatcgctcggctttatcaccatgcggacccgcggaacaggcaaggtcttcgggacctcatatcctctggggtgaccatccagataatgacggagcaagagagcggatactgctggcgaaactttgttaactacagcccaagcaatgaggcacactggcctagatatccgcatctctgggttcgactgtatgtccttgaactgtactgcataattctgggacttccgccatgcttgaacattctgcggcggaaacaaccacagctgacctttttcacgattgctctccaaagttgtcactaccagcgattgccaccccacatcttgtgggctactggactcaagtctggaggaagttcaggcggaagcagcgggtctgaaacgcccggaacctcagagagcgcaacgcccgaaagctctggagggtcaagtggtggtagtgataagaaatactccatcggcctcgccatcggtacgaattctgtcggttgggccgttatcaccgatgagtacaaggtcccttctaagaaattcaaggttttgggcaatacagaccgccattctataaaaaaaaacctgatcggcgcccttttgtttgacagtggtgagactgctgaagcgactcgcctgaagcgaactgccaggaggcggtatacgaggcgaaaaaaccgaatttgttacctccaggagattttctcaaatgaaatggccaaggtagatgatagtttttttcaccgcttggaagaaagttttctcgttgaggaggacaaaaagcacgagaggcacccaatctttggcaacatagtcgatgaggtcgcataccatgagaaatatcctacgatctatcatctccgcaagaagctggtcgatagcacggataaagctgacctccggctgatctaccttgctcttgctcacatgattaaattcaggggccatttcctgatagaaggagacctcaatcccgacaattctgatgtcgacaaactgtttattcagctcgttcagacctataatcaactctttgaggagaaccccatcaatgcttcaggggtggacgcaaaggccattttgtccgcgcgcttgagtaaatcacgacgcctcgagaatttgatagctcaactgccgggtgagaagaaaaacgggttgtttgggaatctcatagcgttgagtttgggacttacgccaaactttaagtctaactttgatttggccgaagatgccaaattgcagctgtccaaagatacctatgatgacgacttggataaccttcttgcgcagattggtgaccaatacgcggatctgtttcttgccgcaaaaaatctgtccgacgccatactcttgtccgatatactgcgcgtcaatactgagataactaaggctcccctcagcgcgtccatgattaaaagatacgatgagcaccaccaagatctcactctgttgaaagccctggttcgccagcagcttccagagaagtataaggagatatttttcgaccaatctaaaaacggctatgcgggttacattgacggtggcgcctctcaagaagaattctacaagtttataaagccgatacttgagaaaatggacggtacagaggaattgttggttaagctcaatcgcgaggacttgttgagaaagcagcgcacatttgacaatggtagtattccacaccagattcatctgggcgagttgcatgccattcttagaagacaagaagatttttatccgtttctgaaagataacagagaaaagattgaaaagatacttacctttcgcataccgtattatgtaggtcccctggctagagggaacagtcgcttcgcttggatgactcgaaaatcagaagaaacaataaccccctggaattttgaagaagtggtagataaaggtgcgagtgcccaatcttttattgagcggatgacaaattttgacaagaatctgcctaacgaaaaggtgcttcccaagcattcccttttgtatgaatactttacagtatataatgaactgactaaagtgaagtacgttaccgaggggatgcgaaagccagcttttctcagtggcgagcagaaaaaagcaatagttgacctgctgttcaagacgaataggaaggttaccgtcaaacagctcaaagaagattactttaaaaagatcgaatgttttgattcagttgagataagcggagtagaggatagatttaacgcaagtcttggaacttatcatgaccttttgaagatcatcaaggataaagattttttggacaacgaggagaatgaagatatcctggaagatatagtacttaccttgacgctttttgaagatcgagagatgatcgaggagcgacttaagacgtacgcacatctctttgacgataaggttatgaaacaattgaaacgccggcggtatactggctggggcaggctttctcgaaagctgattaatggtatccgcgataagcagtctggaaagacaatccttgactttctgaaaagtgatggatttgcaaatagaaactttatgcagcttatacatgatgactctttgacgttcaaggaagacatccagaaggcacaggtatccggccaaggggatagcctccatgaacacatagccaacctggccggctcaccagctattaaaaagggaatattgcaaaccgttaaggttgttgacgaactcgttaaggttatgggccgacacaaaccagagaatatcgtgattgagatggctagggagaatcagaccactcaaaaaggtcagaaaaattctcgcgaaaggatgaagcgaattgaagagggaatcaaagaacttggctctcaaattttgaaagagcacccggtagaaaacactcagctgcagaatgaaaagctgtatctgtattatctgcagaatggtcgagatatgtacgttgatcaggagctggatatcaataggctcagtgactacgatgtcgaccacatcgttcctcaatctttcctgaaagatgactctatcgacaacaaagtgttgacgcgatcagataagaaccggggaaaatccgacaatgtaccctcagaagaagttgtcaagaagatgaaaaactattggagacaattgctgaacgccaagctcataacacaacgcaagttcgataacttgacgaaagccgaaagaggtgggttgtcagaattggacaaagctggctttattaagcgccaattggtggagacccggcagattacgaaacacgtagcacaaattttggattcacgaatgaataccaaatacgacgaaaacgacaaattgatacgcgaggtgaaagtgattacgcttaagagtaagttggtttccgatttcaggaaggattttcagttttacaaagtaagagaaataaacaactaccaccacgcccatgatgcttacctcaacgcggtagttggcacagctcttatcaaaaaatatccaaagctggaaagcgagttcgtttacggtgactataaagtatacgacgttcggaagatgatagccaaatcagagcaggaaattgggaaggcaaccgcaaaatacttcttctattcaaacatcatgaacttctttaagacggagattacgctcgcgaacggcgaaatacgcaagaggcccctcatagagactaacggcgaaaccggggagatcgtatgggacaaaggacgggactttgcgaccgttagaaaagtactttcaatgccacaagtgaatattgttaaaaagacagaagtacaaacaggggggttcagtaaggaatccattttgcccaagcggaacagtgataaattgatagcaaggaaaaaagattgggaccctaagaagtacggtggtttcgactctcctaccgttgcatattcagtccttgtagttgcgaaagtggaaaaggggaaaagtaagaagcttaagagtgttaaagagcttctgggcataaccataatggaacggtctagcttcgagaaaaatccaattgactttctcgaggctaaaggttacaaggaggtaaaaaaggacctgataattaaactcccaaagtacagtctcttcgagttggagaatgggaggaagagaatgttggcatctgcaggggagctccaaaaggggaacgagctggctctgccttcaaaatacgtgaactttctgtacctggccagccactacgagaaactcaagggttctcctgaggataacgagcagaaacagctgtttgtagagcagcacaagcattacctggacgagataattgagcaaattagtgagttctcaaaaagagtaatccttgcagacgcgaatctggataaagttctttccgcctataataagcaccgggacaagcctatacgagaacaagccgagaacatcattcacctctttacccttactaatctgggcgcgccggccgccttcaaatacttcgacaccacgatagacaggaaaaggtatacgagtaccaaagaagtacttgacgccactctcatccaccagtctataacagggttgtacgaaacgaggatagatttgtcccagctcggcggcgactcaggagggtcaggcggctccggtggatcaacgaatctttccgacataatcgagaaagaaaccggcaaacagttggtgatccaagaatcaatcctgatgctgcctgaagaagtagaagaggtgattggcaacaaacctgagtctgacattcttgtccacaccgcgtatgacgagagcacggacgagaacgttatgcttctcactagcgacgcccctgagtataaaccatgggcgctggtcatccaagattccaatggggaaaacaagattaagatgcttagtggtgggtctggagggagcggtgggtccacgaacctcagcgacattattgaaaaagagactggtaaacaacttgtaatacaagagtctattctgatgttgcctgaagaggtggaggaggtgattgggaacaaaccggagtctgatatacttgttcataccgcctatgacgaatctactgatgagaatgtgatgcttttaacgtcagacgctcccgagtacaaaccctgggctctggtgattcaggacagcaatggtgagaataagattaaaatgttgagtgggggctcaaagcgcacggctgacggtagcgaatttgagagccccaaaaaaaaacgaaaggtcgaataa

SEQ ID NO: 25 - DNA, 5514 bp, Artificial Sequence
  Description of Artificial Sequence: Synthetic polynucleotide
atgagcagcgagacaggccctgtggctgtggatcctacactgcggagaagaatcgagccccacgagttcgaggtgttcttcgaccccagagagctgcggaaagagacatgcctgctgtacgagatcaactggggcggcagacactctatctggcggcacacaagccagaacaccaacaagcacgtggaagtgaactttatcgagaagtttacgaccgagcggtacttctgccccaacaccagatgcagcatcacctggtttctgagctggtccccttgcggcgagtgcagcagagccatcaccgagtttctgtccagatatccccacgtgaccctgttcatctatatcgcccggctgtaccaccacgccgatcctagaaatagacagggactgcgcgacctgatcagcagcggagtgaccatccagatcatgaccgagcaagagagcggctactgctggcggaacttcgtgaactacagccccagcaacgaagcccactggcctagatatcctcacctgtgggtccgactgtacgtgctggaactgtactgcatcatcctgggcctgcctccatgcctgaacatcctgagaagaaagcagcctcagctgaccttcttcacaatcgccctgcagagctgccactaccagagactgcctccacacatcctgtgggccaccggacttaagagcggaggatctagcggcggctctagcggatctgagacacctggcacaagcgagtctgccacacctgagagtagcggcggatcttctggcggctccgacaagaagtactctatcggactggccatcggcaccaactctgttggatgggccgtgatcaccgacgagtacaaggtgcccagcaagaaattcaaggtgctgggcaacaccgaccggcacagcatcaagaagaatctgatcggcgccctgctgttcgactctggcgaaacagccgaagccaccagactgaagagaaccgccaggcggagatacacccggcggaagaaccggatctgctacctgcaagagatcttcagcaacgagatggccaaggtggacgacagcttcttccacagactggaagagtccttcctggtggaagaggacaagaagcacgagcggcaccccatcttcggcaacatcgtggatgaggtggcctaccacgagaagtaccccaccatctaccacctgagaaagaaactggtggacagcaccgacaaggccgacctgagactgatctacctggctctggcccacatgatcaagttccggggccactttctgatcgagggcgatctgaaccccgacaacagcgacgtggacaagctgttcatccagctggtgcagacctacaaccagctgttcgaggaaaaccccatcaacgcctctggcgtggacgccaaggctatcctgtctgccagactgagcaagagcagaaggctggaaaacctgatcgcccagctgcctggcgagaagaagaatggcctgttcggcaacctgattgccctgagcctgggactgacccctaacttcaagagcaacttcgacctggccgaggatgccaaactgcagctgagcaaggacacctacgacgacgacctggacaatctgctggcccagatcggcgatcagtacgccgacttgtttctggccgccaagaacctgtccgacgccatcctgctgagcgatatcctgagagtgaacaccgagatcacaaaggcccctctgagcgcctctatgatcaagagatacgacgagcaccaccaggatctgaccctgctgaaggccctcgttagacagcagctgccagagaagtacaaagagattttcttcgatcagtccaagaacggctacgccggctacattgatggcggagccagccaagaggaattctacaagttcatcaagcccatcctggaaaagatggacggcaccgaggaactgctggtcaagctgaacagagaggacctgctgcggaagcagcggaccttcgacaatggctctatccctcaccagatccacctgggagagctgcacgccattctgcggagacaagaggacttttacccattcctgaaggacaaccgggaaaagatcgagaagatcctgaccttcaggatcccctactacgtgggaccactggccagaggcaatagcagattcgcctggatgaccagaaagagcgaggaaaccatcacaccctggaacttcgaggaagtggtggacaagggcgccagcgctcagtccttcatcgagcggatgaccaacttcgataagaacctgcctaacgagaaggtgctgcccaagcactccctgctgtatgagtacttcaccgtgtacaacgagctgaccaaagtgaaatacgtgaccgagggaatgagaaagcccgcctttctgagcggcgagcagaaaaaggccattgtggatctgctgttcaagaccaaccggaaagtgaccgtgaagcagctgaaagaggactacttcaagaaaatcgagtgcttcgacagcgtggaaatcagcggcgtggaagatcggttcaatgccagcctgggcacataccacgacctgctgaaaattatcaaggacaaggacttcctggacaacgaagagaacgaggacattctcgaggacatcgtgctgaccctgacactgtttgaggacagagagatgatcgaggaacggctgaaaacatacgcccacctgttcgacgacaaagtgatgaagcaactgaagcggaggcggtacacaggctggggcagactgtctcggaagctgatcaacggcatccgggataagcagtccggcaagacaatcctggatttcctgaagtccgacggcttcgccaacagaaacttcatgcagctgatccacgacgacagcctgacctttaaagaggacatccagaaagcccaggtgtccggccaaggcgattctctgcacgagcacattgccaacctggccggatctcccgccattaagaagggcatcctgcagacagtgaaggtggtggacgagcttgtgaaagtgatgggcagacacaagcccgagaacatcgtgatcgaaatggccagagagaaccagaccacacagaagggccagaagaacagccgcgagagaatgaagcggatcgaagagggcatcaaagagctgggcagccagatcctgaaagaacaccccgtggaaaacacccagctgcagaacgagaagctgtacctgtactacctgcagaatggacgggatatgtacgtggaccaagagctggacatcaaccggctgagcgactacgatgtggaccatatcgtgccccagagctttctgaaggacgactccatcgataacaaggtcctgaccagaagcgacaagaaccggggcaagagcgataacgtgccctccgaagaggtggtcaagaagatgaagaactactggcgacagctgctgaacgccaagctgattacccagcggaagttcgataacctgaccaaggccgagagaggcggcctgagcgaacttgataaggccggcttcattaagcggcagctggtggaaacccggcagatcaccaaacacgtggcacagattctggactcccggatgaacactaagtacgacgagaatgacaagctgatccgggaagtgaaagtcatcaccctgaagtctaagctggtgtccgatttccggaaggatttccagttctacaaagtgcgggaaatcaacaactaccatcacgcccacgacgcctacctgaatgccgttgttggaacagccctgatcaagaagtatcccaagctggaaagcgagttcgtgtacggcgactacaaggtgtacgacgtgcggaagatgatcgccaagagcgaacaagagatcggcaaggctaccgccaagtactttttctacagcaacatcatgaactttttcaagacagagatcaccctggccaacggcgagatccggaaaagacccctgatcgagacaaacggcgaaaccggggagatcgtgtgggataagggcagagattttgccacagtgcggaaagtgctgagcatgccccaagtgaatatcgtgaagaaaaccgaggtgcagacaggcggcttcagcaaagagtctatcctgcctaagcggaacagcgataagctgatcgccagaaagaaggactgggaccctaagaagtacggcggcttcgatagccctaccgtggcctattctgtgctggtggtggccaaagtggaaaagggcaagtccaaaaagctcaagagcgtgaaagagctgctggggatcaccatcatggaaagaagcagctttgagaagaacccgatcgactttctggaagccaagggctacaaagaagtcaagaaggacctcatcatcaagctccccaagtacagcctgttcgagctggaaaatggccggaagcggatgctggcctcagcaggcgaactgcagaaaggcaatgaactggccctgcctagcaaatacgtcaacttcctgtacctggccagccactatgagaagctgaagggcagccccgaggacaatgagcaaaagcagctgtttgtggaacagcacaagcactacctggacgagatcatcgagcagatcagcgagttctccaagagagtgatcctggccgacgctaacctggataaggtgctgtctgcctataacaagcaccgggacaagcctatcagagagcaggccgagaatatcatccacctgtttaccctgaccaacctgggagcccctgccgccttcaagtacttcgacaccaccatcgaccggaagaggtacaccagcaccaaagaggtgctggacgccacactgatccaccagtctatcaccggcctgtacgaaacccggatcgacctgtctcagctcggcggcgattctggtggttctggcggaagtggcggatccaccaatctgagcgacatcatcgaaaaagagacaggcaagcagctcgtgatccaagaatccatcctgatgctgcctgaagaggttgaggaagtgatcggcaacaagcctgagtccgacatcctggtgcacaccgcctacgatgagagcaccgatgagaacgtcatgctgctgacaagcgacgcccctgagtacaagccttgggctctcgtgattcaggacagcaatggggagaacaagatcaagatgctgagcggaggtagcggaggcagtggcggaagcacaaacctgtctgatatcattgaaaaagaaaccgggaagcaactggtcattcaagagtccattctcatgctcccggaagaagtcgaggaagtcattggaaacaaacccgagagcgatattctggtccacacagcctatgacgagtctacagacgaaaacgtgatgctcctgacctctgacgctcccgagtataagccctgggcacttgttatccaggactctaacggggaaaacaaaatcaaaatgttgtccggcggcagcaagcggacagccgatggatctgagttcgagagccccaagaagaaacggaaggtggagtaa

SEQ ID NO: 26 - protein, 1367 aa, Streptococcus pyogenes
MDKKYSIGLDIGTNSVGWAVITDDYKVPSKKFKVLGNTDRHSIKKNLIGALLFGSGETAEATRLKRTARRRYTRRKNRICYLQEIFSNEMAKVDDSFFHRLEESFLVEEDKKHERHPIFGNIVDEVAYHEKYPTIYHLRKKLADSTDKADLRLIYLALAHMIKFRGHFLIEGDLNPDNSDVDKLFIQLVQIYNQLFEENPINASRVDAKAILSARLSKSRRLENLIAQLPGEKRNGLFGNLIALSLGLTPNFKSNFDLAEDAKLQLSKDTYDDDLDNLLAQIGDQYADLFLAAKNLSDAILLSDILRVNSEITKAPLSASMIKRYDEHHQDLTLLKALVRQQLPEKYKEIFFDQSKNGYAGYIDGGASQEEFYKFIKPILEKMDGTEELLVKLNREDLLRKQRTFDNGSIPHQIHLGELHAILRRQEDFYPFLKDNREKIEKILTFRIPYYVGPLARGNSRFAWMTRKSEETITPWNFEEVVDKGASAQSFIERMTNFDKNLPNEKVLPKHSLLYEYFTVYNELTKVKYVTEGMRKPAFLSGEQKKAIVDLLFKTNRKVTVKQLKEDYFKKIECFDSVEISGVEDRFNASLGAYHDLLKIIKDKDFLDNEENEDILEDIVLTLTLFEDRGMIEERLKTYAHLFDDKVMKQLKRRRYTGWGRLSRKLINGIRDKQSGKTILDFLKSDGFANRNFMQLIHDDSLTFKEDIQKAQVSGQGHSLHEQIANLAGSPAIKKGILQTVKIVDELVKVMGHKPENIVIEMARENQTTQKGQKNSRERMKRIEEGIKELGSQILKEHPVENTQLQNEKLYLYYLQNGRDMYVDQELDINRLSDYDVDHIVPQSFIKDDSIDNKVLTRSDKNRGKSDNVPSEEVVKKMKNYWRQLLNAKLITQRKFDNLTKAERGGLSELDKAGFIKRQLVETRQITKHVAQILDSRMNTKYDENDKLIREVKVITLKSKLVSDFRKDFQFYKVREINNYHHAHDAYLNAVVGTALIKKYPKLESEFVYGDYKVYDVRKMIAKSEQEIGKATAKYFFYSNIMNFFKTEITLANGEIRKRPLIETNGETGEIVWDKGRDFATVRKVLSMPQVNIVKKTEVQTGGFSKESILPKRNSDKLIARKKDWDPKKYGGFDSPTVAYSVLVVAKVEKGKSKKLKSVKELLGITIMERSSFEKNPIDFLEAKGYKEVKKDLIIKLPKYSLFELENGRKRMLASAGELQKGNELALPSKYVNFLYLASHYEKLKGSPEDNEQKQLFVEQHKHYLDEIIEQISEFSKRVILADANLDKVLSAYNKHRDKPIREQAENIIHLFTLTNLGAPAAFKYFDTTIDRKRYTSTKEVLDATLIHQSITGLYETRIDLSQLGGD

SEQ ID NO: 27 - DNA, 306 bp, Artificial Sequence
  Description of Artificial Sequence: Synthetic polynucleotide
tgcctgtcatacgaaaccgagatactgacagtagaatatggccttctgccaatcgggaagattgtggagaaacggatagaatgcacagtttactctgtcgataacaatggtaacatttatactcagccagttgcccagtggcacgaccggggagagcaggaagtattcgaatactgtctggaggatggaagtctcattagggccactaaggaccacaaatttatgacagtcgatggccagatgctgcctatagacgaaatctttgagcgagagttggacctcatgcgagttgacaaccttcctaat

SEQ ID NO: 28 - protein, 102 aa, Artificial Sequence
  Description of Artificial Sequence: Synthetic polypeptide
CLSYETEILTVEYGLLPIGKIVEKRIECTVYSVDNNGNIYTQPVAQWHDRGEQEVFEYCLEDGSLIRATKDHKFMTVDGQMLPIDEIFERELDLMRVDNLPN

SEQ ID NO: 29 - DNA, 108 bp, Artificial Sequence
  Description of Artificial Sequence: Synthetic polynucleotide
atgatcaagatagctacaaggaagtatcttggcaaacaaaacgtttatgatattggagtcgaaagagatcacaactttgctctgaagaacggattcatagcttctaat

SEQ ID NO: 30 - protein, 36 aa, Artificial Sequence
  Description of Artificial Sequence: Synthetic polypeptide
MIKIATRKYLGKQNVYDIGVERDHNFALKNGFIASN

SEQ ID NO: 31 - DNA, 303 bp, Artificial Sequence
  Description of Artificial Sequence: Synthetic polynucleotide
tgcctgtcttatgataccgagatacttaccgttgaatatggcttcttgcctattggaaagattgtcgaagagagaattgaatgcacagtatatactgtagacaagaatggtttcgtttacacacagcccattgctcaatggcacaatcgcggcgaacaagaagtatttgagtactgtctcgaggatggaagcatcatacgagcaactaaagatcataaattcatgaccactgacgggcagatgttgccaatagatgagatattcgagcggggcttggatctcaaacaagtggatggattgcca

SEQ ID NO: 32 - protein, 101 aa, Artificial Sequence
  Description of Artificial Sequence: Synthetic polypeptide
CLSYDTEILTVEYGFLPIGKIVEERIECTVYTVDKNGFVYTQPIAQWHNRGEQEVFEYCLEDGSIIRATKDHKFMTTDGQMLPIDEIFERGLDLKQVDGLP

SEQ ID NO: 33 - DNA, 159 bp, Artificial Sequence
  Description of Artificial Sequence: Synthetic polynucleotide
atgaagaggactgccgatggatcagagtttgaatctcccaagaagaagaggaaagtaaagataatatctcgaaaaagtcttggtacccaaaatgtctatgatattggagtggagaaagatcacaacttccttctcaagaacggtctcgtagccagcaac

SEQ ID NO: 34 - protein, 53 aa, Artificial Sequence
  Description of Artificial Sequence: Synthetic polypeptide
MKRTADGSEFESPKKKRKVKIISRKSLGTQNVYDIGVEKDHNFLLKNGLVASN

SEQ ID NO: 35 - protein, 976 aa, Homo sapiens [sequence omitted]

SEQ ID NO: 36 - DNA, 5190 bp, Homo sapiens
tctgggggctcggctttgccgcgctcgctgcacttgggcgagagctggaacgtggaccagagctcggatcccatcgcagctaccgcgatgagaggcgctcgcggcgcctgggattttctctgcgttctgctcctactgcttcgcgtccagacaggctcttctcaaccatctgtgagtccaggggaaccgtctccaccatccatccatccaggaaaatcagacttaatagtccgcgtgggcgacgagattaggctgttatgcactgatccgggctttgtcaaatggacttttgagatcctggatgaaacgaatgagaataagcagaatgaatggatcacggaaaaggcagaagccaccaacaccggcaaatacacgtgcaccaacaaacacggcttaagcaattccatttatgtgtttgttagagatcctgccaagcttttccttgttgaccgctccttgtatgggaaagaagacaacgacacgctggtccgctgtcctctcacagacccagaagtgaccaattattccctcaaggggtgccaggggaagcctcttcccaaggacttgaggtttattcctgaccccaaggcgggcatcatgatcaaaagtgtgaaacgcgcctaccatcggctctgtctgcattgttctgtggaccaggagggcaagtcagtgctgtcggaaaaattcatcctgaaagtgaggccagccttcaaagctgtgcctgttgtgtctgtgtccaaagcaagctatcttcttagggaaggggaagaattcacagtgacgtgcacaataaaagatgtgtctagttctgtgtactcaacgtggaaaagagaaaacagtcagactaaactacaggagaaatataatagctggcatcacggtgacttcaattatgaacgtcaggcaacgttgactatcagttcagcgagagttaatgattctggagtgttcatgtgttatgccaataatacttttggatcagcaaatgtcacaacaaccttggaagtagtagataaaggattcattaatatcttccccatgataaacactacagtatttgtaaacgatggagaaaatgtagatttgattgttgaatatgaagcattccccaaacctgaacaccagcagtggatctatatgaacagaaccttcactgataaatgggaagattatcccaagtctgagaatgaaagtaatatcagatacgtaagtgaacttcatctaacgagattaaaaggcaccgaaggaggcacttacacattcctagtgtccaattctgacgtcaatgctgccatagcatttaatgtttatgtgaatacaaaaccagaaatcctgacttacgacaggctcgtgaatggcatgctccaatgtgtggcagcaggattcccagagcccacaatagattggtatttttgtccaggaactgagcagagatgctctgcttctgtactgccagtggatgtgcagacactaaactcatctgggccaccgtttggaaagctagtggttcagagttctatagattctagtgcattcaagcacaatggcacggttgaatgtaaggcttacaacgatgtgggcaagacttctgcctattttaactttgcatttaaaggtaacaacaaagagcaaatccatccccacaccctgttcactcctttgctgattggtttcgtaatcgtagctggcatgatgtgcattattgtgatgattctgacctacaaatatttacagaaacccatgtatgaagtacagtggaaggttgttgaggagataaatggaaacaattatgtttacatagacccaacacaacttccttatgatcacaaatgggagtttcccagaaacaggctgagttttgggaaaaccctgggtgctggagctttcgggaaggttgttgaggcaactgcttatggcttaattaagtcagatgcggccatgactgtcgctgtaaagatgctcaagccgagtgcccatttgacagaacgggaagccctcatgtctgaactcaaagtcctgagttaccttggtaatcacatgaatattgtgaatctacttggagcctgcaccattggagggcccaccctggtcattacagaatattgttgctatggtgatcttttgaattttttgagaagaaaacgtgattcatttatttgttcaaagcaggaagatcatgcagaagctgcactttataagaatcttctgcattcaaaggagtcttcctgcagcgatagtactaatgagtacatggacatgaaacctggagtttcttatgttgtcccaaccaaggccgacaaaaggagatctgtgagaataggctcatacatagaaagagatgtgactcccgccatcatggaggatgacgagttggccctagacttagaagacttgctgagcttttcttaccaggtggcaaagggcatggctttcctcgcctccaagaattgtattcacagagacttggcagccagaaatatcctccttactcatggtcggatcacaaagatttgtgattttggtctagccagagacatcaagaatgattctaattatgtggttaaaggaaacgctcgactacctgtgaagtggatggcacctgaaagcattttcaactgtgtatacacgtttgaaagtgacgtctggtcctatgggatttttctttgggagctgttctctttaggaagcagcccctatcctggaatgccggtcgattctaagttctacaagatgatcaaggaaggcttccggatgctcagccctgaacacgcacctgctgaaatgtatgacataatgaagacttgctgggatgcagatcccctaaaaagaccaacattcaagcaaattgttcagctaattgagaagcagatttcagagagcaccaatcatatttactccaacttagcaaactgcagccccaaccgacagaagcccgtggtagaccattctgtgcggatcaattctgtcggcagcaccgcttcctcctcccagcctctgcttgtgcacgacgatgtctgagcagaatcagtgtttgggtcacccctccaggaatgatctcttcttttggcttccatgatggttattttcttttctttcaacttgcatccaactccaggatagtgggcaccccactgcaatcctgtctttctgagcacactttagtggccgatgatttttgtcatcagccaccatcctattgcaaaggttccaactgtatatattcccaatagcaacgtagcttctaccatgaacagaaaacattctgatttggaaaaagagagggaggtatggactgggggccagagtcctttccaaggcttctccaattctgcccaaaaatatggttgatagtttacctgaataaatggtagtaatcacagttggccttcagaaccatccatagtagtatgatgatacaagattagaagctgaaaacctaagtcctttatgtggaaaacagaacatcattagaacaaaggacagagtatgaacacctgggcttaagaaatctagtatttcatgctgggaatgagacataggccatgaaaaaaatgatccccaagtgtgaacaaaagatgctcttctgtggaccactgcatgagcttttatactaccgacctggtttttaaatagagtttgctattagagcattgaattggagagaaggcctccctagccagcacttgtatatacgcatctataaattgtccgtgttcatacatttgaggggaaaacaccataaggtttcgtttctgtatacaaccctggcattatgtccactgtgtatagaagtagattaagagccatataagtttgaaggaaacagttaataccattttttaaggaaacaatataaccacaaagcacagtttgaacaaaatctcctcttttagctgatgaacttattctgtagattctgtggaacaagcctatcagcttcagaatggcattgtactcaatggatttgatgctgtttgacaaagttactgattcactgcatggctcccacaggagtgggaaaacactgccatcttagtttggattcttatgtagcaggaaataaagtataggtttagcctccttcgcaggcatgtcctggacaccgggccagtatctatatatgtgtatgtacgtttgtatgtgtgtagacaaatatttggaggggtatttttgccctgagtccaagagggtcctttagtacctgaaaagtaacttggctttcattattagtactgctcttgtttcttttcacatagctgtctagagtagcttaccagaagcttccatagtggtgcagaggaagtggaaggcatcagtccctatgtatttgcagttcacctgcacttaaggcactctgttatttagactcatcttactgtacctgttccttagaccttccataatgctactgtctcactgaaacatttaaattttaccctttagactgtagcctggatattattcttgtagtttacctctttaaaaacaaaacaaaacaaaacaaaaaactccccttcctcactgcccaatataaaaggcaaatgtgtacatggcagagtttgtgtgttgtcttgaaagattcaggtatgttgcctttatggtttcccccttctacatttcttagactacatttagagaactgtggccgttatctggaagtaaccatttgcactggagttctatgctctcgcacctttccaaagttaacagattttggggttgtgttgtcacccaagagattgttgtttgccatactttgtctgaaaaattcctttgtgtttctattgacttcaatgatagtaagaaaagtggttgttagttatagatgtctaggtacttcaggggcacttcattgagagttttgtcttggatattcttgaaagtttatatttttataattttttcttacatcagatgtttctttgcagtggcttaatgtttgaaattattttgtggctttttttgtaaatattgaaatgtagcaataatgtcttttgaatattcccaagcccatgagtccttgaaaatattttttatatatacagtaactttatgtgtaaatacataagcggcgtaagtttaaaggatgttggtgttccacgtgttttattcctgtatgttgtccaattgttgacagttctgaagaattctaataaaatgtacatatataaatcaaaaaaaaaaaaaaaa

SEQ ID NO: 37 - protein, 356 aa, Homo sapiens
MSIPLPLLQIYTSDNYTEEMGSGDYDSMKEPCFREENANFNKIFLPTIYSIIFLTGIVGNGLVILVMGYQKKLRSMTDKYRLHLSVADLLFVITLPFWAVDAVANWYFGNFLCKAVHVIYTVNLYSSVLILAFISLDRYLAIVHATNSQRPRKLLAEKVVYVGVWIPALLLTIPDFIFANVSEADDRYICDRFYPNDLWVVVFQFQHIMVGLILPGIVILSCYCIIISKLSHSKGHQKRKALKTTVILILAFFACWLPYYIGISIDSFILLEIIKQGCEFENTVHKWISITEALAFFHCCLNPILYAFLGAKFKTSAQHALTSVSRGSSLKILSKGKRGGHSSVSTESESSSFHSS

SEQ ID NO: 38 - DNA, 1691 bp, Homo sapiens
aacttcagtttgttggctgcggcagcaggtagcaaagtgacgccgagggcctgagtgctccagtagccaccgcatctggagaaccagcggttaccatggaggggatcagtatatacacttcagataactacaccgaggaaatgggctcaggggactatgactccatgaaggaaccctgtttccgtgaagaaaatgctaatttcaataaaatcttcctgcccaccatctactccatcatcttcttaactggcattgtgggcaatggattggtcatcctggtcatgggttaccagaagaaactgagaagcatgacggacaagtacaggctgcacctgtcagtggccgacctcctctttgtcatcacgcttcccttctgggcagttgatgccgtggcaaactggtactttgggaacttcctatgcaaggcagtccatgtcatctacacagtcaacctctacagcagtgtcctcatcctggccttcatcagtctggaccgctacctggccatcgtccacgccaccaacagtcagaggccaaggaagctgttggctgaaaaggtggtctatgttggcgtctggatccctgccctcctgctgactattcccgacttcatctttgccaacgtcagtgaggcagatgacagatatatctgtgaccgcttctaccccaatgacttgtgggtggttgtgttccagtttcagcacatcatggttggccttatcctgcctggtattgtcatcctgtcctgctattgcattatcatctccaagctgtcacactccaagggccaccagaagcgcaaggccctcaagaccacagtcatcctcatcctggctttcttcgcctgttggctgccttactacattgggatcagcatcgactccttcatcctcctggaaatcatcaagcaagggtgtgagtttgagaacactgtgcacaagtggatttccatcaccgaggccctagctttcttccactgttgtctgaaccccatcctctatgctttccttggagccaaatttaaaacctctgcccagcacgcactcacctctgtgagcagagggtccagcctcaagatcctctccaaaggaaagcgaggtggacattcatctgtttccactgagtctgagtcttcaagttttcactccagctaacacagatgtaaaagacttttttttatacgataaataacttttttttaagttacacatttttcagatataaaagactgaccaatattgtacagtttttattgcttgttggatttttgtcttgtgtttctttagtttttgtgaagtttaattgacttatttatataaattttttttgtttcatattgatgtgtgtctaggcaggacctgtggccaagttcttagttgctgtatgtctcgtggtaggactgtagaaaagggaactgaacattccagagcgtgtagtgaatcacgtaaagctagaaatgatccccagctgtttatgcatagataatctctccattcccgtggaacgtttttcctgttcttaagacgtgattttgctgtagaagatggcacttataaccaaagcccaaagtggtatagaaatgctggtttttcagttttcaggagtgggttgatttcagcacctacagtgtacagtcttgtattaagttgttaataaaagtacatgttaaacttaaaaaaaaaaaaaaaaaa

SEQ ID NO: 39 - protein, 993 aa, Homo sapiens
MPALARDGGQLPLLVVFSAMIFGTITNQDLPVIKCVLINHKNNDSSVGKSSSYPMVSESPEDLGCALRPQSSGTVYEAAAVEVDVSASITLQVLVDAPGNISCLWVFKHSSLNCQPHFDLQNRGVVSMVILKMTETQAGEYLLFIQSEATNYTILFTVSIRNTLLYTLRRPYFRKMENQDALVCISESVPEPIVEWVLCDSQGESCKEESPAVVKKEEKVLHELFGTDIRCCARNELGRECTRLFTIDLNQTPQTTLPQLFLKVGEPLWIRCKAVHVNHGFGLTWELENKALEEGNYFEMSTYSTNRTMIRILFAFVSSVARNDTGYYTCSSSKHPSQSALVTIVEKGFINATNSSEDYEIDQYEEFCFSVRFKAYPQIRCTWTFSRKSFPCEQKGLDNGYSISKFCNHKHQPGEYIFHAENDDAQFTKMFTLNIRRKPQVLAEASASQASCFSDGYPLPSWTWKKCSDKSPNCTEEITEGVWNRKANRKVFGQWVSSSTLNMSEAIKGFLVKCCAYNSLGTSCETILLNSPGPFPFIQDNISFYATIGVCLLFIVVLTLLICHKYKKQFRYESQLQMVQVTGSSDNEYFYVDFREYEYDLKWEFPRENLEFGKVLGSGAFGKVMNATAYGISKTGVSIQVAVKMLKEKADSSEREALMSELKMMTQLGSHENIVNLLGACTLSGPIYLIFEYCCYGDLLNYLRSKREKFHRTWTEIFKEHNFSFYPTFQSHPNSSMPGSREVQIHPDSDQISGLHGNSFHSEDEIEYENQKRLEEEEDLNVLTFEDLLCFAYQVAKGMEFLEFKSCVHRDLAARNVLVTHGKVVKICDFGLARDIMSDSNYVVRGNARLPVKWMAPESLFEGIYTIKSDVWSYGILLWEIFSLGVNPYPGIPVDANFYKLIQNGFKMDQPFYATEEIYIIMQSCWAFDSRKRPSFPNLTSFLGCQLADAEEAMYQNVDGRVSECPHTYQNRRPFSREMDLGLLSPQAQVEDS

SEQ ID NO: 40 - DNA, 3848 bp, Homo sapiens
acctgcagcgcgaggcgcgccgctccaggcggcatcgcagggctgggccggcgcggcctggggaccccgggctccggaggccatgccggcgttggcgcgcgacggcggccagctgccgctgctcgttgttttttctgcaatgatatttgggactattacaaatcaagatctgcctgtgatcaagtgtgttttaatcaatcataagaacaatgattcatcagtggggaagtcatcatcatatcccatggtatcagaatccccggaagacctcgggtgtgcgttgagaccccagagctcagggacagtgtacgaagctgccgctgtggaagtggatgtatctgcttccatcacactgcaagtgctggtcgacgccccagggaacatttcctgtctctgggtctttaagcacagctccctgaattgccagccacattttgatttacaaaacagaggagttgtttccatggtcattttgaaaatgacagaaacccaagctggagaatacctactttttattcagagtgaagctaccaattacacaatattgtttacagtgagtataagaaataccctgctttacacattaagaagaccttactttagaaaaatggaaaaccaggacgccctggtctgcatatctgagagcgttccagagccgatcgtggaatgggtgctttgcgattcacagggggaaagctgtaaagaagaaagtccagctgttgttaaaaaggaggaaaaagtgcttcatgaattatttgggacggacataaggtgctgtgccagaaatgaactgggcagggaatgcaccaggctgttcacaatagatctaaatcaaactcctcagaccacattgccacaattatttcttaaagtaggggaacccttatggataaggtgcaaagctgttcatgtgaaccatggattcgggctcacctgggaattagaaaacaaagcactcgaggagggcaactactttgagatgagtacctattcaacaaacagaactatgatacggattctgtttgcttttgtatcatcagtggcaagaaacgacaccggatactacacttgttcctcttcaaagcatcccagtcaatcagctttggttaccatcgtagaaaagggatttataaatgctaccaattcaagtgaagattatgaaattgaccaatatgaagagttttgtttttctgtcaggtttaaagcctacccacaaatcagatgtacgtggaccttctctcgaaaatcatttccttgtgagcaaaagggtcttgataacggatacagcatatccaagttttgcaatcataagcaccagccaggagaatatatattccatgcagaaaatgatgatgcccaatttaccaaaatgttcacgctgaatataagaaggaaacctcaagtgctcgcagaagcatcggcaagtcaggcgtcctgtttctcggatggatacccattaccatcttggacctggaagaagtgttcagacaagtctcccaactgcacagaagagatcacagaaggagtctggaatagaaaggctaacagaaaagtgtttggacagtgggtgtcgagcagtactctaaacatgagtgaagccataaaagggttcctggtcaagtgctgtgcatacaattcccttggcacatcttgtgagacgatccttttaaactctccaggccccttccctttcatccaagacaacatctcattctatgcaacaattggtgtttgtctcctcttcattgtcgttttaaccctgctaatttgtcacaagtacaaaaagcaatttaggtatgaaagccagctacagatggtacaggtgaccggctcctcagataatgagtacttctacgttgatttcagagaatatgaatatgatctcaaatgggagtttccaagagaaaatttagagtttgggaaggtactaggatcaggtgcttttggaaaagtgatgaacgcaacagcttatggaattagcaaaacaggagtctcaatccaggttgccgtcaaaatgctgaaagaaaaagcagacagctctgaaagagaggcactcatgtcagaactcaagatgatgacccagctgggaagccacgagaatattgtgaacctgctgggggcgtgcacactgtcaggaccaatttacttgatttttgaatactgttgctatggtgatcttctcaactatctaagaagtaaaagagaaaaatttcacaggacttggacagagattttcaaggaacacaatttcagtttttaccccactttccaatcacatccaaattccagcatgcctggttcaagagaagttcagatacacccggactcggatcaaatctcagggcttcatgggaattcatttcactctgaagatgaaattgaatatgaaaaccaaaaaaggctggaagaagaggaggacttgaatgtgcttacatttgaagatcttctttgctttgcatatcaagttgccaaaggaatggaatttctggaatttaagtcgtgtgttcacagagacctggccgccaggaacgtgcttgtcacccacgggaaagtggtgaagatatgtgactttggattggctcgagatatcatgagtgattccaactatgttgtcaggggcaatgcccgtctgcctgtaaaatggatggcccccgaaagcctgtttgaaggcatctacaccattaagagtgatgtctggtcatatggaatattactgtgggaaatcttctcacttggtgtgaatccttaccctggcattccggttgatgctaacttctacaaactgattcaaaatggatttaaaatggatcagccattttatgctacagaagaaatatacattataatgcaatcctgctgggcttttgactcaaggaaacggccatccttccctaatttgacttcgtttttaggatgtcagctggcagatgcagaagaagcgatgtatcagaatgtggatggccgtgtttcggaatgtcctcacacctaccaaaacaggcgacctttcagcagagagatggatttggggctactctctccgcaggctcaggtcgaagattcgtagaggaacaatttagttttaaggacttcatccctccacctatccctaacaggctgtagattaccaaaacaagattaatttcatcactaaaagaaaatctattatcaactgctgcttcaccagacttttctctagaagctgtctgcgtttactcttgttttcaaagggacttttgtaaaatcaaatcatcctgtcacaaggcaggaggagctgataatgaactttattggagcattgatctgcatccaaggccttctcaggctggcttgagtgaattgtgtacctgaagtacagtatattcttgtaaatacataaaacaaaagcattttgctaaggagaagctaatatgattttttaagtctatgttttaaaataatatgtaaatttttcagctatttagtgatatattttatgggtgggaataaaatttctactacagaattgcccattattgaattatttacatggtataattagggcaagtcttaactggagttcacgaaccccctgaaattgtgcacccatagccacctacacattccttccagagcacgtgtgcttttaccccaagatacaaggaatgtgtaggcagctatggttgtcacagcctaagatttctgcaacaacaggggttgtattgggggaagtttataatgaataggtgttctaccataaagagtaatacatcacctagacactttggcggccttcccagactcagggccagtcagaagtaacatggaggattagtattttcaataaagttactcttgtccccacaaaaaaa

SEQ ID NO: 41 - protein, 161 aa, Homo sapiens
MNLAISIALLLTVLQVSRGQKVTSLTACLVDQSLRLDCRHENTSSSPIQYEFSLTRETKKHVLFGTVGVPEHTYRSRTNFTSKYNMKVLYLSAFTSKDEGTYTCALHHSGHSPPISSQNVTVLRDKLVKCEGISLLAQNTSWLLLLLLSLSLLQATDFMSL

SEQ ID NO: 42 - DNA, 4502 bp, Homo sapiens
agcaaccggaggcggcggcgcgtctggaggaggctgcagcagcggaagaccccagtccagatccaggactgagatcccagaaccatgaacctggccatcagcatcgctctcctgctaacagtcttgcaggtctcccgagggcagaaggtgaccagcctaacggcctgcctagtggaccagagccttcgtctggactgccgccatgagaataccagcagttcacccatccagtacgagttcagcctgacccgtgagacaaagaagcacgtgctctttggcactgtgggggtgcctgagcacacataccgctcccgaaccaacttcaccagcaaatacaacatgaaggtcctctacttatccgccttcactagcaaggacgagggcacctacacgtgtgcactccaccactctggccattccccacccatctcctcccagaacgtcacagtgctcagagacaaactggtcaagtgtgagggcatcagcctgctggctcagaacacctcgtggctgctgctgctcctgctctccctctccctcctccaggccacggatttcatgtccctgtgactggtggggcccatggaggagacaggaagcctcaagttccagtgcagagatcctacttctctgagtcagctgaccccctccccccaatccctcaaaccttgaggagaagtggggaccccacccctcatcaggagttccagtgctgcatgcgattatctacccacgtccacgcggccacctcaccctctccgcacacctctggctgtctttttgtactttttgttccagagctgcttctgtctggtttatttaggttttatccttccttttctttgagagttcgtgaagagggaagccaggattggggacctgatggagagtgagagcatgtgaggggtagtgggatggtggggtaccagccactggaggggtcatccttgcccatcgggaccagaaacctgggagagacttggatgaggagtggttgggctgtgcctgggcctagcacggacatggtctgtcctgacagcactcctcggcaggcatggctggtgcctgaagaccccagatgtgagggcaccaccaagaatttgtggcctaccttgtgagggagagaactgagcatctccagcattctcagccacaaccaaaaaaaaataaaaagggcagccctccttaccactgtggaagtccctcagaggccttggggcatgacccagtgaagatgcaggtttgaccaggaaagcagcgctagtggagggttggagaaggaggtaaaggatgagggttcatcatccctccctgcctaaggaagctaaaagcatggccctgctgcccctccctgcctccacccacagtggagagggctacaaaggaggacaagaccctctcaggctgtcccaagctcccaagagcttccagagctctgacccacagcctccaagtcaggtggggtggagtcccagagctgcacagggtttggcccaagtttctaagggaggcacttcctcccctcgcccatcagtgccagcccctgctggctggtgcctgagcccctcagacagccccctgccccgcaggcctgccttctcagggacttctgcggggcctgaggcaagccatggagtgagacccaggagccggacacttctcaggaaatggcttttcccaacccccagcccccacccggtggttcttcctgttctgtgactgtgtatagtgccaccacagcttatggcatctcattgaggacaaagaaaactgcacaataaaaccaagcctctggaatctgtcctcgtgtccacctggccttcgctcctccagcagtgcctgcctgcccccgcttcgctggggtctccacgggtgaggctggggaacgccacctcttcctcttccctgacttctccccaaccacttagtagcaacgctaccccaggggctaatgactgcacactgggcttcttttcagaatgaccctaacgagacacatttgcccaaataaacgaacatcccatgtctgctgactcacctggctggaacaacatgcttactgccaacatgtgggccgaaccacatggccctggctctggaatgcacaagtggctttgcgtgaatctgcgctaagctatgcagtctgctttttcttctcagctctggtagttcttcagaaatgtaccctccaggcacatccactattgcgagggtgagcacgaagggtgggagatgcccatgtcctcaaggcatcacttcctaaatccaaaagcatcggcaggagaaaggactggggacaaatactgtcccttcgggagtagggagggaacactgaggcccatccctggctccttccctaaaagtagagtaaaatggaagcgagcatcctgggattgggggcaagagggggaccgcagggtagctgtgggttccaactgctgtcagagtcagagaggcagccccaagccagcctccctgctttgccagggaatttgggggaggaaggtgacagctgcccagaggctgactcatctgatatttagcactgggtaggatgattgtttctgagcatttttcttaaaggcctcagatctaaattatgccaccggctcccactcttgctacctcccgtcaacttctctgccttgccttccacccctgtagttaccatacacagaggaggaggagctgtccttgtcccaggttgggaggctgacaaccccttagcaagatgctgccagcccagagctctccaaggggaggaacacccctgagactcaggcccctctccttcagccctgcttgggctgcaagcgccgtgccaaggaaaggcatcttggtgagaagagctgctgtgggggaagggagatcaaatgccagagaaatgtggggtgccccaccctcaggatagtaaaagagtatggaggtatttctggaaggaaatgagcggcactgtgtgaagcctcgcacctgtgtgacacttcctatggggtctttgtcacactctagtactatgtccctgaagagtttagcagccacactcttagaagggtgctgggagatggtgttgccctctgcagccatgtttaggggagcggaacctgaggcccacagtgggtgagattagctcaagaagccacagaggccaccagagggccacggacttcggaaaggagaagagaagaacagggcatcaggcctcacaacgcaaacctacccagagatgggcacagtggctcatgcctgtaatcccaccactttgggaagaggcggatcgcttgaggtcaggagttcgagactagcctcgaaaccctatctctactaaaaatacaaaaattagccaggcatggtggcctgcgcctgtaatcccagctactcaggaggctgaggcaggagaatcacttgaacccgggaggcggaggttgcagtgagccaagattgcaccactgcactccagcctgggagatagagtgagactccatctcaaaaaaataaaaaataaaataaacctacccggaatgaccatgctgaggactgggagcccgcagactttcagccacaggccgcgacagccgtgggtccctccctggtcaagtcagcaggccttgtggaggctgtggggtatctgtggtgactcaggtaattatagagggctggcccccagccctggttcctgtacacatgccccaaccccatccccatccactccctcgccagtcctaacctctttcctgggtccccccccttcagcacctaagtccatacctagggccgtggaattcccgctcaagagcaacagaagcccctctctgcacccccatttctggactggattgtccactgagacgcgcaatgtctgcatctctgacatctagaggcttcctcgggaagggcatggggatctccgtgagatgtggggactttcactggccaaccaagaaatctacacagcgtccggggacctgtgacacacatccctcccgcctcctcaacctgatgtccctctctgaatctgcagctttcgtgctgtgaaggtgtctttacatgtgaaacaaacaaacccaagtcaagagtaaatcatctcatttactagtgagaaaatgttggagctggagtccttcagagagtcctggccaggcaagagggccatcagctctcttctgctcaacaggggctctcagcctcaggacactctcaggcctggaatgtccccaacacactcaaggagaaacatgtcctgtgcagacccacaggaggcatctttgcccggcacaaggaagagctggggtcagtgggacctgtagatgtagacacatcatatggagggtgggtaggaccaatgtggcagcttcatggaggccaagtgtggctctgcaccaggaaggggctgtgatggctggaggtgcccagcagtgcaggcggggagtgcctggcagtggcgtggccaggtggaggccacctgtcaagtttgcaataaagcagtttcctgaatttggtgagaa

SEQ ID NO: 43 - protein, 87 aa, Homo sapiens
MTMYLWLKLLAFGFAFLDTEVFVTGQSPTPSPTGHLQAEEQGSQSKSPNLKSREADSSAFSWWPKAREPLTNHWSKSKSPKAEELGV

SEQ ID NO: 44 - DNA, 1395 bp, Homo sapiens
gacatcatcacctagcagttcatgcagctagcaagtggtttgttcttagggtaacagaggaggaaattgttcctcgtctgataagacaacagtggagaaaggacgcatgctgtttcttagggacacggctgacttccagatatgaccatgtatttgtggcttaaactcttggcatttggctttgcctttctggacacagaagtatttgtgacagggcaaagcccaacaccttcccccactggccatctgcaagctgaggagcaaggaagccaatccaagtcaccaaacctcaaaagtagggaagctgacagttcagccttcagttggtggccaaaggcccgagagcccctcacaaaccactggagtaagtccaagagtccaaaagctgaggaacttggagtctgatgttcaagagcaggaagcagccagcacgagagaaagatgaagaccagaagactcagcaagctcacttctcctaccttcttgtgcctgctttttctagccgtgctggcagttgcttggatgatgcccactcatattgggtgggggtgggggggttggggagggtctgcctcccccagtccactgactcaaatgttaatctcccttggcaatacgctcacaggcacacccaggaacaatactttgcatccttcaatccaatcaagttgacactcaatattaaccatcaaatactattataaggagaatgttgcatgattttccttctagtctgtttgtaattcacatctaatgaaagagtgagagtggacgataaagggaacttgttgaaacatttctctcaaagcaaaagggatcattggaagcaggcagacaccagaattggtttaacctaaaaataacaaattaataattatcaagtctataatgatgacagtgacttaatgtgaatagaaagaattctaaactctctccttccttcctccctcccttctttcctactttctttccactccctttctcccacccccttttcttttcctttcttttctcccaccctctctccctccctttcttttattcaatgcatagtagttgaaaaaatctaaagttagacctgattttacactgaagactagaggtagttactatcctattactgtacttagttggctatgctggcatgtcattatgggtaaaagtttgatggatttatttgtgagttatttggttatgaaaatctagagattgaagtttttcattagaaaataacacacataacaagtctatgatcattttgcatttctgtaatcacagaatagttctgcaatatttcatgtatattggaattgaagttcaattgaattttatctgtatttagtaaaaattaactttagctttgatactaatgaataaagctgggttttttattta

SEQ ID NO: 45 - protein, 385 aa, Homo sapiens
MLVRRGARAGPRMPRGWTALCLLSLLPSGFMSLDNNGTATPELPTQGTFSNVSTNVSYQETTTPSTLGSTSLHPVSQHGNEATTNITETTVKFTSTSVITSVYGNTNSSVQSQTSVISTVFTTPANVSTPETTLKPSLSPGNVSDLSTTSTSLATSPTKPYTSSSPILSDIKAEIKCSGIREVKLTQGICLEQNKTSSCAEFKKDRGEGLARVLCGEEQADADAGAQVCSLLLAQSEVRPQCLLLVLANRTEISSKLQLMKKHQSDLKKLGILDFTEQDVASHQSYSQKTLIALVTSGALLAVLGITGYFLMNRRSWSPTGERLGEDPYYTENGGGQGYSSGPGTSPEAQGKASVNRGAQENGTGQATSRNGHSARQHVVADTEL

SEQ ID NO: 46 - DNA, 7969 bp, Homo sapiens
agtgtcttccactcggtgcgtctctctaggagccgcgcgggaaggatgctggtccgcaggggcgcgcgcgcagggcccaggatgccgcggggctggaccgcgctttgcttgctgagtttgctgccttctgggttcatgagtcttgacaacaacggtactgctaccccagagttacctacccagggaacattttcaaatgtttctacaaatgtatcctaccaagaaactacaacacctagtacccttggaagtaccagcctgcaccctgtgtctcaacatggcaatgaggccacaacaaacatcacagaaacgacagtcaaattcacatctacctctgtgataacctcagtttatggaaacacaaactcttctgtccagtcacagacctctgtaatcagcacagtgttcaccaccccagccaacgtttcaactccagagacaaccttgaagcctagcctgtcacctggaaatgtttcagacctttcaaccactagcactagccttgcaacatctcccactaaaccctatacatcatcttctcctatcctaagtgacatcaaggcagaaatcaaatgttcaggcatcagagaagtgaaattgactcagggcatctgcctggagcaaaataagacctccagctgtgcggagtttaagaaggacaggggagagggcctggcccgagtgctgtgtggggaggagcaggctgatgctgatgctggggcccaggtatgctccctgctccttgcccagtctgaggtgaggcctcagtgtctactgctggtcttggccaacagaacagaaatttccagcaaactccaacttatgaaaaagcaccaatctgacctgaaaaagctggggatcctagatttcactgagcaagatgttgcaagccaccagagctattcccaaaagaccctgattgcactggtcacctcgggagccctgctggctgtcttgggcatcactggctatttcctgatgaatcgccgcagctggagccccacaggagaaaggctgggcgaagacccttattacacggaaaacggtggaggccagggctatagctcaggacctgggacctcccctgaggctcagggaaaggccagtgtgaaccgaggggctcaggaaaacgggaccggccaggccacctccagaaacggccattcagcaagacaacacgtggtggctgataccgaattgtgactcggctaggtggggcaaggctgggcagtgtccgagagagcacccctctctgcatctgaccacgtgctacccccatgctggaggtgacatctcttacgcccaacccttccccactgcacacacctcagaggctgttcttggggccctacaccttgaggaggggcaggtaaactcctgtcctttacacattcggctccctggagccagactctggtcttctttgggtaaacgtgtgacgggggaaagccaaggtctggagaagctcccaggaacaatcgatggccttgcagcactcacacaggacccccttcccctaccccctcctctctgccgcaatacaggaacccccaggggaaagatgagcttttctaggctacaattttctcccaggaagctttgatttttaccgtttcttccctgtattttctttctctactttgaggaaaccaaagtaaccttttgcacctgctctcttgtaatgatatagccagaaaaacgtgttgccttgaaccacttccctcatctctcctccaagacactgtggacttggtcaccagctcctcccttgttctctaagttccactgagctccatgtgccccctctaccatttgcagagtcctgcacagttttctggctggagcctagaacaggcctcccaagttttaggacaaacagctcagttctagtctctctggggccacacagaaactctttttgggctcctttttctccctctggatcaaagtaggcaggaccatgggaccaggtcttggagctgagcctctcacctgtactcttccgaaaaatcctcttcctctgaggctggatcctagccttatcctctgatctccatggcttcctcctccctcctgccgactcctgggttgagctgttgcctcagtcccccaacagatgcttttctgtctctgcctccctcaccctgagccccttccttgctctgcacccccatatggtcatagcccagatcagctcctaacccttatcaccagctgcctcttctgtgggtgacccaggtccttgtttgctgttgatttctttccagaggggttgagcagggatcctggtttcaatgacggttggaaatagaaatttccagagaagagagtattgggtagatattttttctgaatacaaagtgatgtgtttaaatactgcaattaaagtgatactgaaacacatctgttatgtgactctgtcttagctgggtgtgtctgcatgcaagagtgacaccctccattagacctagctagactgtgcagtgatgtggtggggaggaccagccagggaagagggagcacctcagcagacacaggcaccagccaggatgctaaggacctttagccaagtctgccaactattctcctccatggggagaggaaacatccatttccagtggtagaaaggcagacccgaatgtaccagggagcttccaaatggagggtggtatgttgggttcttaggagctgtacccttcatgaacacccttctgagaagaggagcatgctgatcactgctgcaaaatatgcaaaacaaagggaaggggcaatgtcctgtgcaccctttattatcaggccacccccctccccagccccccaggtcagagtagacacagtgaaggactatgtggggactgttgttctagagacctggcagccaactcagggagggggctggtttccaccctcaagattaagacagcagcctaattaaaaaaaaaatctgtaagcatgtacctccccccagcttccaaaacaacccccaccccacccctaccaggccataggaagttggggagggagtgctgaggagctccaggaaacactcccaagtgtgtcgacagtggcagaggcagttggggccaaacaaaggttgattcttccattcttatctccataaagccagacctttcccttcagcactcctccacccccatctccttcttgcttttctccaactcctctaatcataggttcttccctaggacagaggggaggcgaaatgatgaggttcagagtcttccctcaaaggcgatggctgccttgagggttggagcaaaggatgatgagcaaaagacgatggtaatcagtagggaagtccagcccacttgcatctagttgcacatcttgccttgagagtaatccagtgagggtctgtcccagctaggacatcaagtaggaggggtgggttcagggttcagattcctaggaaatatgggaggagaggaaaaggcaacttggatgcacctccagcttcaggcctagcaacctgcaatgcatctcaccctgagtttgctggaatgtgtatgtatgctttgggaggaagggctgtgtgtgtattgcggggtggggtggggcagctggttccctctgacagctggacagcttgccctgaagaatttgcctgctttctggaaaaatccaactttcccaccgtgggcctgagcgtcctggtacagcaatggcgccacctgctggccttattgaggtcctactgctcagcctcagctcaatcgcctccatgttgggcttctctccctggctgccccaccctctagtccaatttctcttgtacacaaagctcatataactatagaacgtcactgttgaagagaactttaaagatacatttaattaaactcccttatggtatagttaaagacaaactaaggctcagagaagggaggtggcttgcccaatcacccagaattccaaagtcctgaatctgtagttttcccttccatcatatcatcctactcttctgccgagtcctccgtgttactccagttggatgtcatgaagccagtgtggcagtgtgaagataggtttgggacttcacttctggagcatttcatcaacataagctatcctaggcctggccagccaagcaggtcctggaggagccccaggacaaagatcacaggaggccatgaggttcggcttcttcggcgcccacagtgagcccaggaaaattagctgtagggtattacactgttgactatggagagcatatctggaattatcttcagccagattttcatctgaatggataaatgggaataccatctaagtccagataaatagatcacttccatctcatcccttctaggtagattaatcccacacttcctcttcacacaaaaccagtaataggtcatcgattttgtgcaacaggatgctgcttctcttcctaaagcccccatcgaagaggcttccagccaccattcaatcattcatcaagtcttatgatgtgccagacactgcgcgaaatgtgccagaacatctgttatgtgccagacactgttcttgagactggggatacagcaaacactcatgaagcttataattctagcagaagaggacagtaaacaatgtcatctcagtaagtatatacatgtgttttcaggattgagagctatgaaaaacataaaatatattgagaataatggttggtattttacatatggtggttacttttagaaaaataacagtggagagcacagcttcacttgaatgaagtggagaagcaggttgtatgccaagctgggagagattatcccacacaggggaaaggacaagtgcaaagccctatgatgaaaagctgccaagtgcagaaagcctcagatggcagggggcaagatggccatgaggttgtgtcagtgagtgggggtggggagaggcaggaggtcagactacatggggcctttttagttgtagattgggaagccactggagggttttgagcagagaagtcatatcatctgctttatgttttaaaaggatcatgctggctgctgagtagagaatagaggttgagggataagaaagtagaaggagaccgtagcaagaagaacgatcatggctgggagcaggtgatcatattggcagtgatgagatcaagcagaattcaaaaagtggtttcaaagtagaggtaacaggacttgctcagtctatttatttcttcaaataataatcatatttacaatgatagtagctaacagtttttgagtgcttactgtatgaaaattgagatatggtgccaatatttaaatagcatattttacttaacattcacagaaaccctgtgaagtaggttctattatctcagaaaaagaaactgaaactcagagaataacaagggactgtgttacgtgcacagtggcagaggcaaagatgaataggatgtgagtttatttgaaccccaaatgtttaaatcttggggataatacaacacacatttaaacaaagaagcaagaaaaaaaatgcacaacagaaagtgagaaataacacgaggaaagactaaatgaagtgctttgtatctagatgtgggcaggaccctttccagctgagaagatctgagactgggtcatgaacaggtggtttctgagtgggtcctgtaaaaatgaatacgattttgatgatagtaatgagtaaggacatttgagactgatagaagagtacatacaatatgtagtgatggggaaagataaggtactgtcaaaggacaatgtgttttctggtatgacagagaagtagaatgtgttaagggaagccgagtaccagaaagatccgggtgtcacagtttgtgtagggtgtttaaagctaaaccacagagtttaattttatccaatagaagaggagccacagaagagtttccatttattcattaatttattcatttattcaaaaaatatttgagtgcttattataagccaggtactatgccaggcacctgggataagacatagtcccttctgtcaagtctttacattgggtggatgtgggagggacagatgacagaacaatatgcattgagtgtaagtgctatggtataggaagctctgagtgggaggggcatggaagccgtggaagaccatggaaggcttcccaggagaagtgacgtctggactgatcctttggtcaagcaggagttaaagaggagaaaaggagagatatgggtgttcccgagagaggaagaagccttgtcccaggagcaaagtgagggtgattgttccagaaatgtgagtgattcttttaaggctcaagcaaagcatgtgattcttctttataccttctatttctttgctgagtgtttctgttcttttgtttcaagcatgctgcaattgctcattaaagcatgtttatgatggctgtctgttttaaaattcttgtcagatggtttcaacatctttatcatctcaatgttggcatctgttaatggttttttctcaatcaaattgagattttcctggttcttggtattaccagtgattttaattgcatctggaaatttgggatttatgttgaaagactggatcttattgaaagattctgtttagcacccctcctttgataccacactggtgggtccaggttccccattcagctgttgacaccttcagggcagagaggtgggatggggtgaagggggtacctcattattgctggcccaggttagaagttcaggcttcccagtagatctctgctgataccaccctggtgccatgtcattccttgagtccaaaagtccctcccaattctgccttcttctctctacatatcggagtctccctatgtttgacttatatataatgtccagggtttttagagttagttaacaggaggcataagaaaaagtgtgtccactccatcttgtctggaactggaagttcaagtcgaatataagagagaggagaggaaattacaagccatgagactggagagttaggcaggttctacaccagctattctcaaagccctcttacactcttaaaaatttagaacttcaaagagcttttgattttgaaagttacatctatcaattattactgtttcaaaaattaaaattgagaaaattttatttattaatttgtttaaaaataacaataattattcaattacatgataatgtaagtaatgcttttcttaatgaaaaataattatattttccaaaacaaaaacaattaggaaaaagagtgtcattgttttagactttggtaaatctctctaatatctggctgaagagaagaatgctgattctttttttttttttttttttttgagacggagtctcgctctgtcacccaggctggagtgtagtggtgtgatctcggctcactgcaagctctgcctcccgggttcacgccattctcctgcctcagcctcccaagtagctgggactacaggcacccgccaccacgcccggctaatttttttgtatttttagtagagatggggtttcaccgtgttagccaggctggtctcgatctcctgacctcatgatccacccacctcagcctcccaaagcgctgggattacaggtgtgagacaccgcgcccagcccccgaatgctgattcttttatctgcttctgtattcaatctgttgtgatatgatgggtagcctctgaaacactccactgtatacttgtgaaagaatgaatgtgaaaaaggaaaatagatttgtagtattattattcaaattgttttgacctcagagaccacttggaaatgttttagggaacccccagaggaccttggatcatgctttgagaaccgcggctctagatatgttactatttcagtagcatctaagtacatgtggctgctgagcacttgtaatgtggctagtgcaaatgagagacaggacttccagctatatgtaatttaataaactcaaatttaaaaactggaacctcataaaatgttttgttgttgttgttaaacatgaccttatagttttggtaggaa

SEQ ID NO: 47 - protein, 273 aa, Homo sapiens
MKKTQTWILTCIYLQLLLFNPLVKTEGICRNRVTNNVKDVTKLVANLPKDYMITLKYVPGMDVLPSHCWISEMVVQLSDSLTDLLDKFSNISEGLSNYSIIDKLVNIVDDLVECVKENSSKDLKKSFKSPEPRLFTPEEFFRIFNRSIDAFKDFVVASETSDCVVSSTLSPEKDSRVSVTKPFMLPPVAASSLRNDSSSSNRKAKNPPGDSSLHWAAMALPALFSLIIGFAFGALYWKKRQPSLTRAVENIQINEEDNEISMLQEKEREFQEV

SEQ ID NO: 48 - DNA, 5376 bp, Homo sapiens
gggcttcgctcgccgcctcgcgccgagactagaagcgctgcgggaagcagggacagtggagagggcgctgcgctcgggctacccaatgcgtggactatctgccgccgctgttcgtgcaatatgctggagctccagaacagctaaacggagtcgccacaccactgtttgtgctggatcgcagcgctgcctttccttatgaagaagacacaaacttggattctcacttgcatttatcttcagctgctcctatttaatcctctcgtcaaaactgaagggatctgcaggaatcgtgtgactaataatgtaaaagacgtcactaaattggtggcaaatcttccaaaagactacatgataaccctcaaatatgtccccgggatggatgttttgccaagtcattgttggataagcgagatggtagtacaattgtcagacagcttgactgatcttctggacaagttttcaaatatttctgaaggcttgagtaattattccatcatagacaaacttgtgaatatagtggatgaccttgtggagtgcgtgaaagaaaactcatctaaggatctaaaaaaatcattcaagagcccagaacccaggctctttactcctgaagaattctttagaatttttaatagatccattgatgccttcaaggactttgtagtggcatctgaaactagtgattgtgtggtttcttcaacattaagtcctgagaaagggaaggccaaaaatccccctggagactccagcctacactgggcagccatggcattgccagcattgttttctcttataattggctttgcttttggagccttatactggaagaagagacagccaagtcttacaagggcagttgaaaatatacaaattaatgaagaggataatgagataagtatgttgcaagagaaagagagagagtttcaagaagtgtaattgtggcttgtatcaacactgttactttcgtacattggctggtaacagttcatgtttgcttcataaatgaagcagctttaaacaaattcatattctgtctggagtgacagaccacatctttatctgttcttgctacccatgactttatatggatgattcagaaattggaacagaatgttttactgtgaaactggcactgaattaatcatctataaagaagaacttgcatggagcaggactctattttaaggactgcgggacttgggtctcatttagaacttgcagctgatgttggaagagaaagcacgtgtctcagactgcatgtaccatttgcatggctccagaaatgtctaaatgctgaaaaaacacctagctttattcttcagatacaaactgcagcctgtagttatcctggtctctgcaagtagatttcagcttggatagtgagggtaacaatttttctcaaagggatctggaaaaaatgtttaaaactcagtagtgtcagccactgtacagtgtagaaagcagtgggaactgtgattggatttggcaacatgtcagctttatagttgccgattagtgatatgggtctgatttcgatctcttcctgatgtaaaccatgctcacccatatcccactatacaaatgcaaatggttgcctggttccatttatgcaagggagccagtactgaattatgccttggcagaggggagactccaaaagagtcatcgcaggaagaagttaagaacactgaacatcagaacagtctgccaagaaggacattggcatcctgggaaagtccgccttttcccttgaccactatagggtgtataaatcgtgtttgcaaaatgtgttatgatgtgtttatattctaaaactattacagagctatgtaaagggacttaggagaaaatgctgaatgtaagatggtcccatttcaatttccaccatgggagagcctaaaaataaattatgacatttagtatctaaggttagaaaaccacgcccacatgctaatatgggtgttgaaaactaggttacttataatgcaaggaatcaggaaactttagttatttatagtataatcaccattatctgtttaaaggatccatttagttaaaatcgggcactctatattcattaaggtttatgaattaaaaagaaagctttatgtagttatgcatgtcagtttgctatttaaaatgtgtgacagtgtttgtcatattaagagtgaatttggcaggaattcccaagatggacattgtgcttttaaactagaacttgtaagacattatgtgaatatcccttgccaattttttttataataagaaaacatctgactaaagtcaaagaatgatttcttatggtttattttgatgaaagttcttttaacatgtcttgaatgtacacataaaggaatccaaagctttccattctaacttaatctttgtgataacattattgccatgttctacaaccgtaagatgacagttttcaatgtagtgacacaaaagggcatgaaaaactaactgctagctttcctttcatttcaaaagtccaagaatttctagtatatttggattttagcttctgttcaaagcaaatccagatgcaactccagtaagtggcctttgctcttttttgtaccaaagagcccagatgattcctacagtccctttcttctctaacatgctgtggttccttaaatatgagtaatttctctaagatataacccaggtgctttgagaagctgcattaaggtgttcaggccctcagatatcacatggtacacttgattagtaataaaaccagagatcaatttaaattgctgataggtcctgtctcagtgtgtggcattgactgttttcaggaaaatagatacagattaatatgagttatgcgtgtaggttgtgtatagattgagaagatagatacttctcaatctagtagtttgatttatttaaccaatggtttcagtttgcttgagcatatgaaaatcctgcttaatgtgcttaagagtataataaatgtgtacttttgtcctcaaacctagtagctgggttttaacactcatggacatggtcttaatcaatggagttaaataaacaaattcagcaagttattaaatctgacatggtaggagaggggagatgtgtcctgcttattaaatgtgttggtccattgaaagttacatggattgccaatttttaaaacactaaagttgaataaaatgcatgaacaatagaaaaatgctgaacattattttggatgctagctgcttggacattaactgtgttatttctgctttgagatgaaaatatatatttatctttgcttattttatcccagatgtgttctgaatatccttcttcataaatcatggaaaactcactgctgagatagtaaaccatgaaatcgccttttcagttggtgccatgtatctgacagttccatcttggaaggtttcaaaattaccttttaaaatgatctcagaagtctgtagattctcaatgatactgaaagctttgcacctctttggtagaaaccaggtctatttagaaaatggctttatgataaatgttgcctcctgagtgataatgaagtgttcctggatattgtattgtaatttaatgtgcttaccacactgccacattttaatgagtcagagaaaaattaatttttcttcaatacaataatagaacaagtagcctattctcttaaaaagtatgtgaaaagaaaattatgaaaaaatatgcatacctaatgaagtattggttttagtaagaattaaatacatttcattgagctttaaagtactttggagaaactttggggcacgttttcctactctaattcaactaaagttataaataaagagaaaaactcattcagaaatcatggattttaaaaatattttactgcagccaagttttcatttcaaaatgtaatttcagtttggagcttttaggcattatgtatatttaaaaaatatattcttcaaaaatgcattttggcatggtgggatggatgttgcaaaagatatccggagcctccagtctgtcattaactgatatggtaaatcacctctcttctttgggtctcaattttttatttatctatatggtaaactcagagatcactccttaggggtgagtcctattgcaatatgaccgacaaagaagacaaaatagcattgaaactaacccatacaaaatatccaactctggattctgtgaataagtatcttgaccataaaaagtcattgctgttcttgtttctaatgtaaatagtgtccattagtaaaagtgaaattcagtcttaagtagggtgaattggatcaccatttacacaagagatggctttttcctttgcttgaataaacattttggatcacctccaaagaatgaaaaccagtagtacgttttagtcatattagtcaggatgagaaactataagatgtgtgtaacatttggaaatgcaccaaagtgagcgtttaaatcttctcattttattgaaaactaagagcagaaaatgtaaaatgctcatgaaggttttgaatgccaaaagatattttagaatcaatttataaaggggtaattcattaattacactttaaaattggaaagtgggataagaaatctaaagtaaaccagcttatctttgaaacaatattattttgaaattggctttaaaataaaaccattcagattgaaattctaattagctcatttgtggagtttgatcacacaattcataatgttgctgctttccattaactagtcttgaaatgcctttgtttgtaaaaataaaataatggtactttcattttataacaaggtgtttttttcaagaaataatccatgctaaaatggatatttgtgatcctgaaatgtttactaagcattgtaaatttatttataactgccatctccaactacatccttatgatgtttttaacaataaaattaaaacaactgttaaactaaaaaccacaccgttttccagtacttgatctctgagctacaatactcactaaatataattttccaatcaaaatattctattctatattctaagggttaatatgtgattatagtgtccacttgccaccatttttttaaatcaatggacttgaaaagtattaatttagatggatgcgcagatataccctcagttcagtcatagattggagtttgcatataataatgtaaatgtatgtcgacactattctaaatagttctattatgactgaaatttaattaaataaaaaaggttgtaaaatgtgatgtgtatgtgtatatactgtatgtgtactttttaaaataggtgtatgtcccaacccttttttatacaggtttgaatttaaaattacatgatatatacatatactttattgttctaaataaagaattttatgcactctcaaaaaaaaaaaaaaaaaa

SEQ ID NO: 49 - protein, 24 aa, Artificial Sequence
  Description of Artificial Sequence: Synthetic peptide
SGGSSGSETPGTSESATPESSGGS

SEQ ID NO: 50 - protein, 32 aa, Artificial Sequence
  Description of Artificial Sequence: Synthetic polypeptide
SGGSSGGSSGSETPGTSESATPESSGGSSGGS

SEQ ID NO: 51 - protein, 104 aa, Artificial Sequence
  Description of Artificial Sequence: Synthetic polypeptide
GGSGGSPGSPAGSPTSTEEGTSESATPESGPGTSTEPSEGSAPGSPAGSPTSTEEGTSTEPSEGSAPGTSTEPSEGSAPGTSESATPESGPGSEPATSGGSGGS

SEQ ID NO: 52 - protein, 16 aa, Artificial Sequence
  Description of Artificial Sequence: Synthetic peptide
SGSETPGTSESATPES

SEQ ID NO: 53 - protein, 24 aa, Artificial Sequence
  Description of Artificial Sequence: Synthetic peptide
SGGSSGGSSGSETPGTSESATPES

SEQ ID NO: 54 - protein, 40 aa, Artificial Sequence
  Description of Artificial Sequence: Synthetic polypeptide
SGGSSGGSSGSETPGTSESATPESSGGSSGGSSGGSSGGS

SEQ ID NO: 55 - protein, 64 aa, Artificial Sequence
  Description of Artificial Sequence: Synthetic polypeptide
SGGSSGGSSGSETPGTSESATPESSGGSSGGSSGGSSGGSSGSETPGTSESATPESSGGSSGGS

SEQ ID NO: 56 - protein, 92 aa, Artificial Sequence
  Description of Artificial Sequence: Synthetic polypeptide
PGSPAGSPTSTEEGTSESATPESGPGTSTEPSEGSAPGSPAGSPTSTEEGTSTEPSEGSAPGTSTEPSEGSAPGTSESATPESGPGSEPATS

SEQ ID NO: 57 - protein, 18 aa, Unknown
  Description of Unknown: nuclear localization sequence
KRTADGSEFESPKKKRKV

SEQ ID NO: 58 - protein, 16 aa, Unknown
  Description of Unknown: nuclear localization sequence
KRPAATKKAGQAKKKK

SEQ ID NO: 59 - protein, 17 aa, Unknown
  Description of Unknown: nuclear localization sequence
KKTELQTTNAENKTKKL

SEQ ID NO: 60 - protein, 19 aa, Unknown
  Description of Unknown: nuclear localization sequence
KRGINDRNFWRGENGRKTR

SEQ ID NO: 61 - protein, 16 aa, Unknown
  Description of Unknown: nuclear localization sequence
RKSGKIAAIVVKRPRK

SEQ ID NO: 62 - protein, 7 aa, Unknown
  Description of Unknown: nuclear localization sequence
PKKKRKV

SEQ ID NO: 63 - protein, 30 aa, Unknown
  Description of Unknown: nuclear localization sequence
MDSLLMNRRKFLYQFKNVRWAKGRRETYLC

SEQ ID NO: 64 - protein, 84 aa, Bacillus phage PBS2
MTNLSDIIEKETGKQLVIQESILMLPEEVEEVIGNKPESDILVHTAYDESTDENVMLLTSDAPEYKPWALVIQDSNGENKIKML

SEQ ID NO: 65 - protein, 1368 aa, Streptococcus pyogenes [sequence omitted]

SEQ ID NO: 66 - RNA, 80 nt, Artificial Sequence
  Description of Artificial Sequence: Synthetic oligonucleotide
guuuuagagcuagaaauagcaaguuaaaauaaggcuaguccguuaucaacuugaaaaaguggcaccgagucggugcuuuu

SEQ ID NO: 67 - RNA, 125 nt, Artificial Sequence
  Description of Artificial Sequence: Synthetic polynucleotide
guuuuuguacucucaagauuuaaguaacuguacaacgaaacuuacacaguuacuuaaaucuugcagaagcuacaaagauaaggcuucaugccgaaaucaacacccugucauuuuauggcagggug

SEQ ID NO: 68 - RNA, 76 nt, Artificial Sequence
  Description of Artificial Sequence: Synthetic oligonucleotide
guuuuagagcuagaaauagcaaguuaaaauaaggcuaguccguuaucaacuugaaaaaguggcaccgagucggugc

SEQ ID NO: 69 - RNA, 84 nt, Artificial Sequence
  Description of Artificial Sequence: Synthetic oligonucleotide
guuuuaguacucuguaaugaaaauuacagaaucuacuaaaacaaggcaaaaugccguguuuaucucgucaacuuguuggcgaga

SEQ ID NO: 70 - DNA, 97 bp, Artificial Sequence
  Description of Artificial Sequence: Synthetic oligonucleotide
  Description of Combined DNA/RNA Molecule: Synthetic oligonucleotide
guucugtcuuuuggucaggacaaccgucuagcuauaagugcugcagggugugagaaacuccuauugcuggacgaugucucuuacgaggcauuagcac

SEQ ID NO: 71 - RNA, 88 nt, Artificial Sequence
  Description of Artificial Sequence: Synthetic oligonucleotide
gaccuauagggucaaugaaucugugcgugugccauaaguaauuaaaaauuacccaccacaggagcaccugaaaacaggugcuuggcac

SEQ ID NO: 72 - DNA, 4104 bp, Streptococcus pyogenes
atggataagaaatactcaataggcttagatatcggcacaaatagcgtcggatgggcggtgatcactgatgattataaggttccgtctaaaaagttcaaggttctgggaaatacagaccgccacagtatcaaaaaaaatcttataggggctcttttatttggcagtggagagacagcggaagcgactcgtctcaaacggacagctcgtagaaggtatacacgtcggaagaatcgtatttgttatctacaggagattttttcaaatgagatggcgaaagtagatgatagtttctttcatcgacttgaagagtcttttttggtggaagaagacaagaagcatgaacgtcatcctatttttggaaatatagtagatgaagttgcttatcatgagaaatatccaactatctatcatctgcgaaaaaaattggcagattctactgataaagcggatttgcgcttaatctatttggccttagcgcatatgattaagtttcgtggtcattttttgattgagggagatttaaatcctgataatagtgatgtggacaaactatttatccagttggtacaaatctacaatcaattatttgaagaaaaccctattaacgcaagtagagtagatgctaaagcgattctttctgcacgattgagtaaatcaagacgattagaaaatctcattgctcagctccccggtgagaagagaaatggcttgtttgggaatctcattgctttgtcattgggattgacccctaattttaaatcaaattttgatttggcagaagatgctaaattacagctttcaaaagatacttacgatgatgatttagataatttattggcgcaaattggagatcaatatgctgatttgtttttggcagctaagaatttatcagatgctattttactttcagatatcctaagagtaaatagtgaaataactaaggctcccctatcagcttcaatgattaagcgctacgatgaacatcatcaagacttgactcttttaaaagctttagttcgacaacaacttccagaaaagtataaagaaatcttttttgatcaatcaaaaaacggatatgcaggttatattgatgggggagctagccaagaagaattttataaatttatcaaaccaattttagaaaaaatggatggtactgaggaattattggtgaaactaaatcgtgaagatttgctgcgcaagcaacggacctttgacaacggctctattccccatcaaattcacttgggtgagctgcatgctattttgagaagacaagaagacttttatccatttttaaaagacaatcgtgagaagattgaaaaaatcttgacttttcgaattccttattatgttggtccattggcgcgtggcaatagtcgttttgcatggatgactcggaagtctgaagaaacaattaccccatggaattttgaagaagttgtcgataaaggtgcttcagctcaatcatttattgaacgcatgacaaactttgataaaaatcttccaaatgaaaaagtactaccaaaacatagtttgctttatgagtattttacggtttataacgaattgacaaaggtcaaatatgttactgagggaatgcgaaaaccagcatttctttcaggtgaacagaagaaagccattgttgatttactcttcaaaacaaatcgaaaagtaaccgttaagcaattaaaagaagattatttcaaaaaaatagaatgttttgatagtgttgaaatttcaggagttgaagatagatttaatgcttcattaggcgcctaccatgatttgctaaaaattattaaagataaagattttttggataatgaagaaaatgaagatatcttagaggatattgttttaacattgaccttatttgaagatagggggatgattgaggaaagacttaaaacatatgctcacctctttgatgataaggtgatgaaacagcttaaacgtcgccgttatactggttggggacgtttgtctcgaaaattgattaatggtattagggataagcaatctggcaaaacaatattagattttttgaaatcagatggttttgccaatcgcaattttatgcagctgatccatgatgatagtttgacatttaaagaagatattcaaaaagcacaggtgtctggacaaggccatagtttacatgaacagattgctaacttagctggcagtcctgctattaaaaaaggtattttacagactgtaaaaattgttgatgaactggtcaaagtaatggggcataagccagaaaatatcgttattgaaatggcacgtgaaaatcagacaactcaaaagggccagaaaaattcgcgagagcgtatgaaacgaatcgaagaaggtatcaaagaattaggaagtcagattcttaaagagcatcctgttgaaaatactcaattgcaaaatgaaaagctctatctctattatctacaaaatggaagagacatgtatgtggaccaagaattagatattaatcgtttaagtgattatgatgtcgatcacattgttccacaaagtttcattaaagacgattcaatagacaataaggtactaacgcgttctgataaaaatcgtggtaaatcggataacgttccaagtgaagaagtagtcaaaaagatgaaaaactattggagacaacttctaaacgccaagttaatcactcaacgtaagtttgataatttaacgaaagctgaacgtggaggtttgagtgaacttgataaagctggttttatcaaacgccaattggttgaaactcgccaaatcactaagcatgtggcacaaattttggatagtcgcatgaatactaaatacgatgaaaatgataaacttattcgagaggttaaagtgattaccttaaaatctaaattagtttctgacttccgaaaagatttccaattctataaagtacgtgagattaacaattaccatcatgcccatgatgcgtatctaaatgccgtcgttggaactgctttgattaagaaatatccaaaacttgaatcggagtttgtctatggtgattataaagtttatgatgttcgtaaaatgattgctaagtctgagcaagaaataggcaaagcaaccgcaaaatatttcttttactctaatatcatgaacttcttcaaaacagaaattacacttgcaaatggagagattcgcaaacgccctctaatcgaaactaatggggaaactggagaaattgtctgggataaagggcgagattttgccacagtgcgcaaagtattgtccatgccccaagtcaatattgtcaagaaaacagaagtacagacaggcggattctccaaggagtcaattttaccaaaaagaaattcggacaagcttattgctcgtaaaaaagactgggatccaaaaaaatatggtggttttgatagtccaacggtagcttattcagtcctagtggttgctaaggtggaaaaagggaaatcgaagaagttaaaatccgttaaagagttactagggatcacaattatggaaagaagttcctttgaaaaaaatccgattgactttttagaagctaaaggatataaggaagttaaaaaagacttaatcattaaactacctaaatatagtctttttgagttagaaaacggtcgtaaacggatgctggctagtgccggagaattacaaaaaggaaatgagctggctctgccaagcaaatatgtgaattttttatatttagctagtcattatgaaaagttgaagggtagtccagaagataacgaacaaaaacaattgtttgtggagcagcataagcattatttagatgagattattgagcaaatcagtgaattttctaagcgtgttattttagcagatgccaatttagataaagttcttagtgcatataacaaacatagagacaaaccaatacgtgaacaagcagaaaatattattcatttatttacgttgacgaatcttggagctcccgctgcttttaaatattttgatacaacaattgatcgtaaacgatatacgtctacaaaagaagttttagatgccactcttatccatcaatccatcactggtctttatgaaacacgcattgatttgagtcagctaggaggtgactga

SEQ ID NO: 73 - DNA, 4212 bp, Streptococcus pyogenes
atggataaaaagtattctattggtttagacatcggcactaattccgttggatgggctgtcataaccgatgaatacaaagtaccttcaaagaaatttaaggtgttggggaacacagaccgtcattcgattaaaaagaatcttatcggtgccctcctattcgatagtggcgaaacggcagaggcgactcgcctgaaacgaaccgctcggagaaggtatacacgtcgcaagaaccgaatatgttacttacaagaaatttttagcaatgagatggccaaagttgacgattctttctttcaccgtttggaagagtccttccttgtcgaagaggacaagaaacatgaacggcaccccatctttggaaacatagtagatgaggtggcatatcatgaaaagtacccaacgatttatcacctcagaaaaaagctagttgactcaactgataaagcggacctgaggttaatctacttggctcttgcccatatgataaagttccgtgggcactttctcattgagggtgatctaaatccggacaactcggatgtcgacaaactgttcatccagttagtacaaacctataatcagttgtttgaagagaaccctataaatgcaagtggcgtggatgcgaaggctattcttagcgcccgcctctctaaatcccgacggctagaaaacctgatcgcacaattacccggagagaagaaaaatgggttgttcggtaaccttatagcgctctcactaggcctgacaccaaattttaagtcgaacttcgacttagctgaagatgccaaattgcagcttagtaaggacacgtacgatgacgatctcgacaatctactggcacaaattggagatcagtatgcggacttatttttggctgccaaaaaccttagcgatgcaatcctcctatctgacatactgagagttaatactgagattaccaaggcgccgttatccgcttcaatgatcaaaaggtacgatgaacatcaccaagacttgacacttctcaaggccctagtccgtcagcaactgcctgagaaatataaggaaatattctttgatcagtcgaaaaacgggtacgcaggttatattgacggcggagcgagtcaagaggaattctacaagtttatcaaacccatattagagaagatggatgggacggaagagttgcttgtaaaactcaatcgcgaagatctactgcgaaagcagcggactttcgacaacggtagcattccacatcaaatccacttaggcgaattgcatgctatacttagaaggcaggaggatttttatccgttcctcaaagacaatcgtgaaaagattgagaaaatcctaacctttcgcataccttactatgtgggacccctggcccgagggaactctcggttcgcatggatgacaagaaagtccgaagaaacgattactccatggaattttgaggaagttgtcgataaaggtgcgtcagctcaatcgttcatcgagaggatgaccaactttgacaagaatttaccgaacgaaaaagtattgcctaagcacagtttactttacgagtatttcacagtgtacaatgaactcacgaaagttaagtatgtcactgagggcatgcgtaaacccgcctttctaagcggagaacagaagaaagcaatagtagatctgttattcaagaccaaccgcaaagtgacagttaagcaattgaaagaggactactttaagaaaattgaatgcttcgattctgtcgagatctccggggtagaagatcgatttaatgcgtcacttggtacgtatcatgacctcctaaagataattaaagataaggacttcctggataacgaagagaatgaagatatcttagaagatatagtgttgactcttaccctctttgaagatcgggaaatgattgaggaaagactaaaaacatacgctcacctgttcgacgataaggttatgaaacagttaaagaggcgtcgctatacgggctggggacgattgtcgcggaaacttatcaacgggataagagacaagcaaagtggtaaaactattctcgattttctaaagagcgacggcttcgccaataggaactttatgcagctgatccatgatgactctttaaccttcaaagaggatatacaaaaggcacaggtttccggacaaggggactcattgcacgaacatattgcgaatcttgctggttcgccagccatcaaaaagggcatactccagacagtcaaagtagtggatgagctagttaaggtcatgggacgtcacaaaccggaaaacattgtaatcgagatggcacgcgaaaatcaaacgactcagaaggggcaaaaaaacagtcgagagcggatgaagagaatagaagagggtattaaagaactgggcagccagatcttaaaggagcatcctgtggaaaatacccaattgcagaacgagaaactttacctctattacctacaaaatggaagggacatgtatgttgatcaggaactggacataaaccgtttatctgattacgacgtcgatcacattgtaccccaatcctttttgaaggacgattcaatcgacaataaagtgcttacacgctcggataagaaccgagggaaaagtgacaatgttccaagcgaggaagtcgtaaagaaaatgaagaactattggcggcagctcctaaatgcgaaactgataacgcaaagaaagttcgataacttaactaaagctgagaggggtggcttgtctgaacttgacaaggccggatttattaaacgtcagctcgtggaaacccgccaaatcacaaagcatgttgcacagatactagattcccgaatgaatacgaaatacgacgagaacgataagctgattcgggaagtcaaagtaatcactttaaagtcaaaattggtgtcggacttcagaaaggattttcaattctataaagttagggagataaataactaccaccatgcgcacgacgcttatcttaatgccgtcgtagggaccgcactcattaagaaatacccgaagctagaaagtgagtttgtgtatggtgattacaaagtttatgacgtccgtaagatgatcgcgaaaagcgaacaggagataggcaaggctacagccaaatacttcttttattctaacattatgaatttctttaagacggaaatcactctggcaaacggagagatacgcaaacgacctttaattgaaaccaatggggagacaggtgaaatcgtatgggataagggccgggacttcgcgacggtgagaaaagttttgtccatgccccaagtcaacatagtaaagaaaactgaggtgcagaccggagggttttcaaaggaatcgattcttccaaaaaggaatagtgataagctcatcgctcgtaaaaaggactgggacccgaaaaagtacggtggcttcgatagccctacagttgcctattctgtcctagtagtggcaaaagttgagaagggaaaatccaagaaactgaagtcagtcaaagaattattggggataacgattatggagcgctcgtcttttgaaaagaaccccatcgacttccttgaggcgaaaggttacaaggaagtaaaaaaggatctcataattaaactaccaaagtatagtctgtttgagttagaaaatggccgaaaacggatgttggctagcgccggagagcttcaaaaggggaacgaactcgcactaccgtctaaatacgtgaatttcctgtatttagcgtcccattacgagaagttgaaaggttcacctgaagataacgaacagaagcaactttttgttgagcagcacaaacattatctcgacgaaatcatagagcaaatttcggaattcagtaagagagtcatcctagctgatgccaatctggacaaagtattaagcgcatacaacaagcacagggataaacccatacgtgagcaggcggaaaatattatccatttgtttactcttaccaacctcggcgctccagccgcattcaagtattttgacacaacgatagatcgcaaacgatacacttctaccaaggaggtgctagacgcgacactgattcaccaatccatcacgggattatatgaaactcggatagatttgtcacagcttgggggtgacggatcccccaagaagaagaggaaagtctcgagcgactacaaagaccatgacggtgattataaagatcatgacatcgattacaaggatgacgatgacaaggctgcagga

SEQ ID NO: 74 - protein, 1368 aa, Streptococcus pyogenes
MDKKYSIGLAIGTNSVGWAVITDEYKVPSKKFKVLGNTDRHSIKKNLIGALLFDSGETAEATRLKRTARRRYTRRKNRICYLQEIFSNEMAKVDDSFFHRLEESFLVEEDKKHERHPIFGNIVDEVAYHEKYPTIYHLRKKLVDSTDKADLRLIYLALAHMIKFRGHFLIEGDLNPDNSDVDKLFIQLVQTYNQLFEENPINASGVDAKAILSARLSKSRRLENLIAQLPGEKKNGLFGNLIALSLGLTPNFKSNFDLAEDAKLQLSKDTYDDDLDNLLAQIGDQYADLFLAAKNLSDAILLSDILRVNTEITKAPLSASMIKRYDEHHQDLTLLKALVRQQLPEKYKEIFFDQSKNGYAGYIDGGASQEEFYKFIKPILEKMDGTEELLVKLNREDLLRKQRTFDNGSIPHQIHLGELHAILRRQEDFYPFLKDNREKIEKILTFRIPYYVGPLARGNSRFAWMTRKSEETITPWNFEEVVDKGASAQSFIERMTNFDKNLPNEKVLPKHSLLYEYFTVYNELTKVKYVTEGMRKPAFLSGEQKKAIVDLLFKTNRKVTVKQLKEDYFKKIECFDSVEISGVEDRFNASLGTYHDLLKIIKDKDFLDNEENEDILEDIVLTLTLFEDREMIEERLKTYAHLFDDKVMKQLKRRRYTGWGRLSRKLINGIRDKQSGKTILDFLKSDGFANRNFMQLIHDDSLTFKEDIQKAQVSGQGDSLHEHIANLAGSPAIKKGILQTVKVVDELVKVMGRHKPENIVIEMARENQTTQKGQKNSRERMKRIEEGIKELGSQILKEHPVENTQLQNEKLYLYYLQNGRDMYVDQELDINRLSDYDVDHIVPQSFLKDDSIDNKVLTRSDKNRGKSDNVPSEEVVKKMKNYWRQLLNAKLITQRKFDNLTKAERGGLSELDKAGFIKRQLVETRQITKHVAQILDSRMNTKYDENDKLIREVKVITLKSKLVSDFRKDFQFYKVREINNYHHAHDAYLNAVVGTALIKKYPKLESEFVYGDYKVYDVRKMIAKSEQEIGKATAKYFFYSNIMNFFKTEITLANGEIRKRPLIETNGETGEIVWDKGRDFATVRKVLSMPQVNIVKKTEVQTGGFSKESILPKRNSDKLIARKKDWDPKKYGGFDSPTVAYSVLVVAKVEKGKSKKLKSVKELLGITIMERSSFEKNPIDFLEAKGYKEVKKDLIIKLPKYSLFELENGRKRMLASAGELQKGNELALPSKYVNFLYLASHYEKLKGSPEDNEQKQLFVEQHKHYLDEIIEQISEFSKRVILADANLDKVLSAYNKHRDKPIREQAENIIHLFTLTNLGAPAAFKYFDTTIDRKRYTSTKEVLDATLIHQSITGLYETRIDLSQLGGD

SEQ ID NO: 75 - DNA, 4107 bp, Streptococcus pyogenes
atggataagaaatactcaataggcttagatatcggcacaaatagcgtcggatgggcggtgatcactgatgaatataaggttccgtctaaaaagttcaaggttctgggaaatacagaccgccacagtatcaaaaaaaatcttataggggctcttttatttgacagtggagagacagcggaagcgactcgtctcaaacggacagctcgtagaaggtatacacgtcggaagaatcgtatttgttatctacaggagattttttcaaatgagatggcgaaagtagatgatagtttctttcatcgacttgaagagtcttttttggtggaagaagacaagaagcatgaacgtcatcctatttttggaaatatagtagatgaagttgcttatcatgagaaatatccaactatctatcatctgcgaaaaaaattggtagattctactgataaagcggatttgcgcttaatctatttggccttagcgcatatgattaagtttcgtggtcattttttgattgagggagatttaaatcctgataatagtgatgtggacaaactatttatccagttggtacaaacctacaatcaattatttgaagaaaaccctattaacgcaagtggagtagatgctaaagcgattctttctgcacgattgagtaaatcaagacgattagaaaatctcattgctcagctccccggtgagaagaaaaatggcttatttgggaatctcattgctttgtcattgggtttgacccctaattttaaatcaaattttgatttggcagaagatgctaaattacagctttcaaaagatacttacgatgatgatttagataatttattggcgcaaattggagatcaatatgctgatttgtttttggcagctaagaatttatcagatgctattttactttcagatatcctaagagtaaatactgaaataactaaggctcccctatcagcttcaatgattaaacgctacgatgaacatcatcaagacttgactcttttaaaagctttagttcgacaacaacttccagaaaagtataaagaaatcttttttgatcaatcaaaaaacggatatgcaggttatattgatgggggagctagccaagaagaattttataaatttatcaaaccaattttagaaaaaatggatggtactgaggaattattggtgaaactaaatcgtgaagatttgctgcgcaagcaacggacctttgacaacggctctattccccatcaaattcacttgggtgagctgcatgctattttgagaagacaagaagacttttatccatttttaaaagacaatcgtgagaagattgaaaaaatcttgacttttcgaattccttattatgttggtccattggcgcgtggcaatagtcgttttgcatggatgactcggaagtctgaagaaacaattaccccatggaattttgaagaagttgtcgataaaggtgcttcagctcaatcatttattgaacgcatgacaaactttgataaaaatcttccaaatgaaaaagtactaccaaaacatagtttgctttatgagtattttacggtttataacgaattgacaaaggtcaaatatgttactgaaggaatgcgaaaaccagcatttctttcaggtgaacagaagaaagccattgttgatttactcttcaaaacaaatcgaaaagtaaccgttaagcaattaaaagaagattatttcaaaaaaatagaatgttttgatagtgttgaaatttcaggagttgaagatagatttaatgcttcattaggtacctaccatgatttgctaaaaattattaaagataaagattttttggataatgaagaaaatgaagatatcttagaggatattgttttaacattgaccttatttgaagatagggagatgattgaggaaagacttaaaacatatgctcacctctttgatgataaggtgatgaaacagcttaaacgtcgccgttatactggttggggacgtttgtctcgaaaattgattaatggtattagggataagcaatctggcaaaacaatattagattttttgaaatcagatggttttgccaatcgcaattttatgcagctgatccatgatgatagtttgacatttaaagaagacattcaaaaagcacaagtgtctggacaaggcgatagtttacatgaacatattgcaaatttagctggtagccctgctattaaaaaaggtattttacagactgtaaaagttgttgatgaattggtcaaagtaatggggcggcataagccagaaaatatcgttattgaaatggcacgtgaaaatcagacaactcaaaagggccagaaaaattcgcgagagcgtatgaaacgaatcgaagaaggtatcaaagaattaggaagtcagattcttaaagagcatcctgttgaaaatactcaattgcaaaatgaaaagctctatctctattatctccaaaatggaagagacatgtatgtggaccaagaattagatattaatcgtttaagtgattatgatgtcgatcacattgttccacaaagtttccttaaagacgattcaatagacaataaggtcttaacgcgttctgataaaaatcgtggtaaatcggataacgttccaagtgaagaagtagtcaaaaagatgaaaaactattggagacaacttctaaacgccaagttaatcactcaacgtaagtttgataatttaacgaaagctgaacgtggaggtttgagtgaacttgataaagctggttttatcaaacgccaattggttgaaactcgccaaatcactaagcatgtggcacaaattttggatagtcgcatgaatactaaatacgatgaaaatgataaacttattcgagaggttaaagtgattaccttaaaatctaaattagtttctgacttccgaaaagatttccaattctataaagtacgtgagattaacaattaccatcatgcccatgatgcgtatctaaatgccgtcgttggaactgctttgattaagaaatatccaaaacttgaatcggagtttgtctatggtgattataaagtttatgatgttcgtaaaatgattgctaagtctgagcaagaaataggcaaagcaaccgcaaaatatttcttttactctaatatcatgaacttcttcaaaacagaaattacacttgcaaatggagagattcgcaaacgccctctaatcgaaactaatggggaaactggagaaattgtctgggataaagggcgagattttgccacagtgcgcaaagtattgtccatgccccaagtcaatattgtcaagaaaacagaagtacagacaggcggattctccaaggagtcaattttaccaaaaagaaattcggacaagcttattgctcgtaaaaaagactgggatccaaaaaaatatggtggttttgatagtccaacggtagcttattcagtcctagtggttgctaaggtggaaaaagggaaatcgaagaagttaaaatccgttaaagagttactagggatcacaattatggaaagaagttcctttgaaaaaaatccgattgactttttagaagctaaaggatataaggaagttaaaaaagacttaatcattaaactacctaaatatagtctttttgagttagaaaacggtcgtaaacggatgctggctagtgccggagaattacaaaaaggaaatgagctggctctgccaagcaaatatgtgaattttttatatttagctagtcattatgaaaagttgaagggtagtccagaagataacgaacaaaaacaattgtttgtggagcagcataagcattatttagatgagattattgagcaaatcagtgaattttctaagcgtgttattttagcagatgccaatttagataaagttcttagtgcatataacaaacatagagacaaaccaatacgtgaacaagcagaaaatattattcatttatttacgttgacgaatcttggagctcccgctgcttttaaatattttgatacaacaattgatcgtaaacgatatacgtctacaaaagaagttttagatgccactcttatccatcaatccatcactggtctttatgaaacacgcattgatttgagtcagctaggaggtgactga

SEQ ID NO: 76 - protein, 1368 aa, Artificial Sequence
  Description of Artificial Sequence: Synthetic polypeptide
MDKKYSIGLAIGTNSVGWAVITDEYKVPSKKFKVLGNTDRHSIKKNLIGALLFDSGETAEATRLKRTARRRYTRRKNRICYLQEIFSNEMAKVDDSFFHRLEESFLVEEDKKHERHPIFGNIVDEVAYHEKYPTIYHLRKKLVDSTDKADLRLIYLALAHMIKFRGHFLIEGDLNPDNSDVDKLFIQLVQTYNQLFEENPINASGVDAKAILSARLSKSRRLENLIAQLPGEKKNGLFGNLIALSLGLTPNFKSNFDLAEDAKLQLSKDTYDDDLDNLLAQIGDQYADLFLAAKNLSDAILLSDILRVNTEITKAPLSASMIKRYDEHHQDLTLLKALVRQQLPEKYKEIFFDQSKNGYAGYIDGGASQEEFYKFIKPILEKMDGTEELLVKLNREDLLRKQRTFDNGSIPHQIHLGELHAILRRQEDFYPFLKDNREKIEKILTFRIPYYVGPLARGNSRFAWMTRKSEETITPWNFEEVVDKGASAQSFIERMTNFDKNLPNEKVLPKHSLLYEYFTVYNELTKVKYVTEGMRKPAFLSGEQKKAIVDLLFKTNRKVTVKQLKEDYFKKIECFDSVEISGVEDRFNASLGTYHDLLKIIKDKDFLDNEENEDILEDIVLTLTLFEDREMIEERLKTYAHLFDDKVMKQLKRRRYTGWGRLSRKLINGIRDKQSGKTILDFLKSDGFANRNFMQLIHDDSLTFKEDIQKAQVSGQGDSLHEHIANLAGSPAIKKGILQTVKVVDELVKVMGRHKPENIVIEMARENQTTQKGQKNSRERMKRIEEGIKELGSQILKEHPVENTQLQNEKLYLYYLQNGRDMYVDQELDINRLSDYDVDAIVPQSFLKDDSIDNKVLTRSDKNRGKSDNVPSEEVVKKMKNYWRQLLNAKLITQRKFDNLTKAERGGLSELDKAGFIKRQLVETRQITKHVAQILDSRMNTKYDENDKLIREVKVITLKSKLVSDFRKDFQFYKVREINNYHHAHDAYLNAVVGTALIKKYPKLESEFVYGDYKVYDVRKMIAKSEQEIGKATAKYFFYSNIMNFFKTEITLANGEIRKRPLIETNGETGEIVWDKGRDFATVRKVLSMPQVNIVKKTEVQTGGFSKESILPKRNSDKLIARKKDWDPKKYGGFDSPTVAYSVLVVAKVEKGKSKKLKSVKELLGITIMERSSFEKNPIDFLEAKGYKEVKKDLIIKLPKYSLFELENGRKRMLASAGELQKGNELALPSKYVNFLYLASHYEKLKGSPEDNEQKQLFVEQHKHYLDEIIEQISEFSKRVILADANLDKVLSAYNKHRDKPIREQAENIIHLFTLTNLGAPAAFKYFDTTIDRKRYTSTKEVLDATLIHQSITGLYETRIDLSQLGGD

SEQ ID NO: 77 - protein, 345 aa, Sulfolobus islandicus
MEVPLYNIFGDNYIIQVATEAENSTIYNNKVEIDDEELRNVLNLAYKIAKNNEDAAAERRGKAKKKKGEEGETTTSNIILPLSGNDKNPWTETLKCYNFPTTVALSEVFKNFSQVKECEEVSAPSFVKPEFYEFGRSPGMVERTRRVKLEVEPHYLIIAAAGWVLTRLGKAKVSEGDYVGVNVFTPTRGILYSLIQNVNGIVPGIKPETAFGLWIARKVVSSVTNPNVSVVRIYTISDAVGQNPTTINGGFSIDLTKLLEKRYLLSERLEAIARNALSISSNMRERYIVLANYIYEYLTGSKRLEDLLYFANRDLIMNLNSDDGKVRDLKLISAYVNGELIRGEG

SEQ ID NO: 78 - protein, 345 aa, Sulfolobus islandicus
MEVPLYNIFGDNYIIQVATEAENSTIYNNKVEIDDEELRNVLNLAYKIAKNNEDAAAERRGKAKKKKGEEGETTTSNIILPLSGNDKNPWTETLKCYNFPTTVALSEVFKNFSQVKECEEVSAPSFVKPEFYKFGRSPGMVERTRRVKLEVEPHYLIMAAAGWVLTRLGKAKVSEGDYVGVNVFTPTRGILYSLIQNVNGIVPGIKPETAFGLWIARKVVSSVTNPNVSVVSIYTISDAVGQNPTTINGGFSIDLTKLLEKRDLLSERLEAIARNALSISSNMRERYIVLANYIYEYLTGSKRLEDLLYFANRDLIMNLNSDDGKVRDLKLISAYVNGELIRGEG

SEQ ID NO: 79 - protein, 987 aa, Unknown
  Description of Unknown: deltaproteobacteria sequence
MEKRINKIRKKLSADNATKPVSRSGPMKTLLVRVMTDDLKKRLEKRRKKPEVMPQVISNNAANNLRMLLDDYTKMKEAILQVYWQEFKDDHVGLMCKFAQPASKKIDQNKLKPEMDEKGNLTTAGFACSQCGQPLFVYKLEQVSEKGKAYTNYFGRCNVAEHEKLILLAQLKPVKDSDEAVTYSLGKFGQRALDFYSIHVTKESTHPVKPLAQIAGNRYASGPVGKALSDACMGTIASFLSKYQDIIIEHQKVVKGNQKRLESLRELAGKENLEYPSVTLPPQPHTKEGVDFAYNEVIARVRMWVNLNLWQKLKLSRDDAKPLLRLKGFPSFPVVERRENEVDWWNTINEVKKLIDAKRDMGRVFWSGVTAEKRNTILEGYNYLPNENDHKKREGSLENPKKPAKRQFGDLLLYLEKKYAGDWGKVFDEAWERIDKKIAGLTSHIEREEARNAEDAQSKAVLTDWLRAKASFVLERLKEMDEKEFYACEIQLQKWYGDLRGNPFAVEAENRVVDISGFSIGSDGHSIQYRNLLAWKYLENGKREFYLLMNYGKKGRIRFTDGTDIKKSGKWQGLLYGGGKAKVIDLTFDPDDEQLIILPLAFGTRQGREFIWNDLLSLETGLIKLANGRVIEKTIYNKKIGRDEPALFVALTFERREVVDPSNIKPVNLIGVARGENIPAVIALTDPEGCPLPEFKDSSGGPTDILRIGEGYKEKQRAIQAAKEVEQRRAGGYSRKFASKSRNLADDMVRNSARDLFYHAVTHDAVLVFANLSRGFGRQGKRTFMTERQYTKMEDWLTAKLAYEGLTSKTYLSKTLAQYTSKTCSNCGFTITYADMDVMLVRLKKTSDGWATTLNNKELKAEYQITYYNRYKRQTVEKELSAELDRLSEESGNNDISKWTKGRRDEALFLLKKRFSHRPVQEQFVCLDCGHEVHAAEQAALNIARSWLFLNSNSTEFKSYKSGKQPFVGAWQAFYKRRLKEVWKPNA

SEQ ID NO: 80 - protein, 1210 aa, Unknown
  Description of Unknown: uncultured Parcubacteria group bacterium
MSKRHPRISGVKGYRLHAQRLEYTGKSGAMRTIKYPLYSSPSGGRTVPREIVSAINDDYVGLYGLSNFDDLYNAEKRNEEKVYSVLDFWYDCVQYGAVFSYTAPGLLKNVAEVRGGSYELTKTLKGSHLYDELQIDKVIKFLNKKEISRANGSLDKLKKDIIDCFKAEYRERHKDQCNKLADDIKNAKKDAGASLGERQKKLFRDFFGISEQSENDKPSFTNPLNLTCCLLPFDTVNNNRNRGEVLFNKLKEYAQKLDKNEGSLEMWEYIGIGNSGTAFSNFLGEGFLGRLRENKITELKKAMMDITDAWRGQEQEEELEKRLRILAALTIKLREPKFDNHWGGYRSDINGKLSSWLQNYINQTVKIKEDLKGHKKDLKKAKEMINRFGESDTKEEAVVSSLLESIEKIVPDDSADDEKPDIPAIAIYRRFLSDGRLTLNRFVQREDVQEALIKERLEAEKKKKPKKRKKKSDAEDEKETIDFKELFPHLAKPLKLVPNFYGDSKRELYKKYKNAAIYTDALWKAVEKIYKSAFSSSLKNSFFDTDFDKDFFIKRLQKIFSVYRRFNTDKWKPIVKNSFAPYCDIVSLAENEVLYKPKQSRSRKSAAIDKNRVRLPSTENIAKAGIALARELSVAGFDWKDLLKKEEHEEYIDLIELHKTALALLLAVTETQLDISALDFVENGTVKDFMKTRDGNLVLEGRFLEMFSQSIVFSELRGLAGLMSRKEFITRSAIQTMNGKQAELLYIPHEFQSAKITTPKEMSRAFLDLAPAEFATSLEPESLSEKSLLKLKQMRYYPHYFGYELTRTGQGIDGGVAENALRLEKSPVKKREIKCKQYKTLGRGQNKIVLYVRSSYYQTQFLEWFLHRPKNVQTDVAVSGSFLIDEKKVKTRWNYDALTVALEPVSGSERVFVSQPFTIFPEKSAEEEGQRYLGIDIGEYGIAYTALEITGDSAKILDQNFISDPQLKTLREEVKGLKLDQRRGTFAMPSTKIARIRESLVHSLRNRIHHLALKHKAKIVYELEVSRFEEGKQKIKKVYATLKKADVYSEIDADKNLQTTVWGKLAVASEISASYTSQFCGACKKLWRAEMQVDETITTQELIGTVRVIKGGTLIDAIKDFMRPPIFDENDTPFPKYRDFCDKHHISKKMRGNSCLFICPFCRANADADIQASQTIALLRYVKEEKKVEDYFERFRKLKNIKVLGQMKKI

SEQ ID NO: 81 - protein, 1129 aa, Alicyclobacillus acidoterrestris
MAVKSIKVKLRLDDMPEIRAGLWKLHKEVNAGVRYYTEWLSLLRQENLYRRSPNGDGEQECDKTAEECKAELLERLRARQVENGHRGPAGSDDELLQLARQLYELLVPQAIGAKGDAQQIARKFLSPLADKDAVGGLGIAKAGNKPRWVRMREAGEPGWEEEKEKAETRKSADRTADVLRALADFGLKPLMRVYTDSEMSSVEWKPLRKGQAVRTWDRDMFQQAIERMMSWESWNQRVGQEYAKLVEQKNRFEQKNFVGQEHLVHLVNQLQQDMKEASPGLESKEQTAHYVTGRALRGSDKVFEKWGKLAPDAPFDLYDAEIKNVQRRNTRRFGSHDLFAKLAEPEYQALWREDASFLTRYAVYNSILRKLNHAKMFATFTLPDATAHPIWTRFDKLGGNLHQYTFLFNEFGERRHAIRFHKLLKVENGVAREVDDVTVPISMSEQLDNLLPRDPNEPIALYFRDYGAEQHFTGEFGGAKIQCRRDQLAHMHRRRGARDVYLNVSVRVQSQSEARGERRPPYAAVFRLVGDNHRAFVHFDKLSDYLAEHPDDGKLGSEGLLSGLRVMSVDLGLRTSASISVFRVARKDELKPNSKGRVPFFFPIKGNDNLVAVHERSQLLKLPGETESKDLRAIREERQRTLRQLRTQLAYLRLLVRCGSEDVGRRERSWAKLIEQPVDAANHMTPDWREAFENELQKLKSLHGICSDKEWMDAVYESVRRVWRHMGKQVRDWRKDVRSGERPKIRGYAKDVVGGNSIEQIEYLERQYKFLKSWSFFGKVSGQVIRAEKGSRFAITLREHIDHAKEDRLKKLADRIIMEALGYVYALDERGKGKWVAKYPPCQLILLEELSEYQFNNDRPPSENNQLMQWSHRGVFQELINQAQVHDLLVGTMYAAFSSRFDARTGAPGIRCRRVPARCTQEHNPEPFPWWLNKFVVEHTLDACPLRADDLIPTGEGEIFVSPFSAEEGDFHQIHADLNAAQNLQQRLWSDFDISQIRLRCDWGEVDGELVLIPRLTGKRTADSYSNKVFYTNTGVTYYERERGKKRRKVFAQEKLSEEEAELLVEADEAREKSVVLMRDPSGIINRGNWTRQKEFWSMVNQRIEGYLVKQIRSRVPLQDSACENTGDI

SEQ ID NO: 82 - protein, 1140 aa, Bacillus hisashii
MAPKKKRKVGIHGVPAAATRSFILKIEPNEEVKKGLWKTHEVLNHGIAYYMNILKLIRQEAIYEHHEQDPKNPKKVSKAEIQAELWDFVLKMQKCNSFTHEVDKDEVFNILRELYEELVPSSVEKKGEANQLSNKFLYPLVDPNSQSGKGTASSGRKPRWYNLKIAGDPSWEEEKKKWEEDKKKDPLAKILGKLAEYGLIPLFIPYTDSNEPIVKEIKWMEKSRNQSVRRLDKDMFIQALERFLSWESWNLKVKEEYEKVEKEYKTLEERIKEDIQALKALEQYEKERQEQLLRDTLNTNEYRLSKRGLRGWREIIQKWLKMDENEPSEKYLEVFKDYQRKHPREAGDYSVYEFLSKKENHFIWRNHPEYPYLYATFCEIDKKKKDAKQQATFTLADPINHPLWVRFEERSGSNLNKYRILTEQLHTEKLKKKLTVQLDRLIYPTESGGWEEKGKVDIVLLPSRQFYNQIFLDIEEKGKHAFTYKDESIKFPLKGTLGGARVQFDRDHLRRYPHKVESGNVGRIYFNMTVNIEPTESPVSKSLKIHRDDFPKVVNFKPKELTEWIKDSKGKKLKSGIESLEIGLRVMSIDLGQRQAAAASIFEVVDQKPDIEGKLFFPIKGTELYAVHRASFNIKLPGETLVKSREVLRKAREDNLKLMNQKLNFLRNVLHFQQFEDITEREKRVTKWISRQENSDVPLVYQDELIQIRELMYKPYKDWVAFLKQLHKRLEVEIGKEVKHWRKSLSDGRKGLYGISLKNIDEIDRTRKFLLRWSLRPTEPGEVRRLEPGQRFAIDQLNHLNALKEDRLKKMANTIIMHALGYCYDVRKKKWQAKNPACQIILFEDLSNYNPYEERSRFENSKLMKWSRREIPRQVALQGEIYGLQVGEVGAQFSSRFHAKTGSPGIRCSVVTKEKLQDNRFFKNLQREGRLTLDKIAVLKEGDLYPDKGGEKFISLSKDRKCVTTHADINAAQNLQKRFWTRTHGFYKVYCKAYQVDGQTVYIPESKDQKQKIIEEFGEGYFILKDGVYEWVNAGKLKIKKGSSKQSSSELVDSDILKDSFDLASELKGEKLMLYRDPSGNVFPSDKWMAAGVFFGKLERILISKLTNQYSISTIEDDSSKQSMKRPAATKKAGQAKKKK

SEQ ID NO: 83 - protein, 1112 aa, Bacillus sp.
MAIRSIKLKMKTNSGTDSIYLRKALWRTHQLINEGIAYYMNLLTLYRQEAIGDKTKEAYQAELINIIRNQQRNNGSSEEHGSDQEILALLRQLYELIIPSSIGESGDANQLGNKFLYPLVDPNSQSGKGTSNAGRKPRWKRLKEEGNPDWELEKKKDEERKAKDPTVKIFDNLNKYGLLPLFPLFTNIQKDIEWLPLGKRQSVRKWDKDMFIQAIERLLSWESWNRRVADEYKQLKEKTESYYKEHLTGGEEWIEKIRKFEKERNMELEKNAFAPNDGYFITSRQIRGWDRVYEKWSKLPESASPEELWKVVAEQQNKMSEGFGDPKVFSFLANRENRDIWRGHSERIYHIAAYNGLQKKLSRTKEQATFTLPDAIEHPLWIRYESPGGTNLNLFKLEEKQKKNYYVTLSKIIWPSEEKWIEKENIEIPLAPSIQFNRQIKLKQHVKGKQEISFSDYSSRISLDGVLGGSRIQFNRKYIKNHKELLGEGDIGPVFFNLVVDVAPLQETRNGRLQSPIGKALKVISSDFSKVIDYKPKELMDWMNTGSASNSFGVASLLEGMRVMSIDMGQRTSASVSIFEVVKELPKDQEQKLFYSINDTELFAIHKRSFLLNLPGEVVTKNNKQQRQERRKKRQFVRSQIRMLANVLRLETKKTPDERKKAIHKLMEIVQSYDSWTASQKEVWEKELNLLTNMAAFNDEIWKESLVELHHRIEPYVGQIVSKWRKGLSEGRKNLAGISMWNIDELEDTRRLLISWSKRSRTPGEANRIETDEPFGSSLLQHIQNVKDDRLKQMANLIIMTALGFKYDKEEKDRYKRWKETYPACQIILFENLNRYLFNLDRSRRENSRLMKWAHRSIPRTVSMQGEMFGLQVGDVRSEYSSRFHAKTGAPGIRCHALTEEDLKAGSNTLKRLIEDGFINESELAYLKKGDIIPSQGGELFVTLSKRYKKDSDNNELTVIHADINAAQNLQKRFWQQNSEVYRVPCQLARMGEDKLYIPKSQTETIKKYFGKGSFVKNNTEQEVYKWEKSEKMKIKTDTTFDLQDLDGFEDISKTIELAQEQQKKYLTMFRDPSGYFFNNETWRPQKEYWSIVNNIIKSCLKKKILSNKVEL

SEQ ID NO: 84 - protein, 707 aa, Unknown
  Description of Unknown: Cas-phi-1 sequence
MADTPTLFTQFLRHHLPGQRFRKDILKQAGRILANKGEDATIAFLRGKSEESPPDFQPPVKCPIIACSRPLTEWPIYQASVAIQGYVYGQSLAEFEASDPGCSKDGLLGWFDKTGVCTDYFSVQGLNLIFQNARKRYIGVQTKVTNRNEKRHKKLKRINAKRIAEGLPELTSDEPESALDETGHLIDPPGLNTNIYCYQQVSPKPLALSEVNQLPTAYAGYSTSGDDPIQPMVTKDRLSISKGQPGYIPEHQRALLSQKKHRRMRGYGLKARALLVIVRIQDDWAVIDLRSLLRNAYWRRIVQTKEPSTITKLLKLVTGDPVLDATRMVATFTYKPGIVQVRSAKCLKNKQGSKLFSERYLNETVSVTSIDLGSNNLVAVATYRLVNGNTPELLQRFTLPSHLVKDFERYKQAHDTLEDSIQKTAVASLPQGQQTEIRMWSMYGFREAQERVCQELGLADGSIPWNVMTATSTILTDLFLARGGDPKKCMFTSEPKKKKNSKQVLYKIRDRAWAKMYRTLLSKETREAWNKALWGLKRGSPDYARLSKRKEELARRCVNYTISTAEKRAQCGRTIVALEDLNIGFFHGRGKQEPGWVGLFTRKKENRWLMQALHKAFLELAHHRGYHVIEVNPAYTSQTCPVCRHCDPDNRDQHNREAFHCIGCGFRGNADLDVATHNIAMVAITGESLKRARGSVASKTPQPLAAE

SEQ ID NO: 85 - protein, 757 aa, Unknown
  Description of Unknown: Cas-phi-2 sequence
MPKPAVESEFSKVLKKHFPGERFRSSYMKRGGKILAAQGEEAVVAYLQGKSEEEPPNFQPPAKCHVVTKSRDFAEWPIMKASEAIQRYIYALSTTERAACKPGKSSESHAAWFAATGVSNHGYSHVQGLNLIFDHTLGRYDGVLKKVQLRNEKARARLESINASRADEGLPEIKAEEEEVATNETGHLLQPPGINPSFYVYQTISPQAYRPRDEIVLPPEYAGYVRDPNAPIPLGVVRNRCDIQKGCPGYIPEWQREAGTAISPKTGKAVTVPGLSPKKNKRMRRYWRSEKEKAQDALLVTVRIGTDWVVIDVRGLLRNARWRTIAPKDISLNALLDLFTGDPVIDVRRNIVTFTYTLDACGTYARKWTLKGKQTKATLDKLTATQTVALVAIDLGQTNPISAGISRVTQENGALQCEPLDRFTLPDDLLKDISAYRIAWDRNEEELRARSVEALPEAQQAEVRALDGVSKETARTQLCADFGLDPKRLPWDKMSSNTTFISEALLSNSVSRDQVFFTPAPKKGAKKKAPVEVMRKDRTWARAYKPRLSVEAQKLKNEALWALKRTSPEYLKLSRRKEELCRRSINYVIEKTRRRTQCQIVIPVIEDLNVRFFHGSGKRLPGWDNFFTAKKENRWFIQGLHKAFSDLRTHRSFYVFEVRPERTSITCPKCGHCEVGNRDGEAFQCLSCGKTCNADLDVATHNLTQVALTGKTMPKREEPRDAQGTAPARKTKKASKSKAPPAEREDQTPAQEPSQTS

SEQ ID NO: 86 - protein, 766 aa, Unknown
  Description of Unknown: Cas-phi-3 sequence
MEKEITELTKIRREFPNKKFSSTDMKKAGKLLKAEGPDAVRDFLNSCQEIIGDFKPPVKTNIVSISRPFEEWPVSMVGRAIQEYYFSLTKEELESVHPGTSSEDHKSFFNITGLSNYNYTSVQGLNLIFKNAKAIYDGTLVKANNKNKKLEKKFNEINHKRSLEGLPIITPDFEEPFDENGHLNNPPGINRNIYGYQGCAAKVFVPSKHKMVSLPKEYEGYNRDPNLSLAGFRNRLEIPEGEPGHVPWFQRMDIPEGQIGHVNKIQRFNFVHGKNSGKVKFSDKTGRVKRYHHSKYKDATKPYKFLEESKKVSALDSILAIITIGDDWVVFDIRGLYRNVFYRELAQKGLTAVQLLDLFTGDPVIDPKKGVVTFSYKEGVVPVFSQKIVPRFKSRDTLEKLTSQGPVALLSVDLGQNEPVAARVCSLKNINDKITLDNSCRISFLDDYKKQIKDYRDSLDELEIKIRLEAINSLETNQQVEIRDLDVFSADRAKANTVDMFDIDPNLISWDSMSDARVSTQISDLYLKNGGDESRVYFEINNKRIKRSDYNISQLVRPKLSDSTRKNLNDSIWKLKRTSEEYLKLSKRKLELSRAVVNYTIRQSKLLSGINDIVIILEDLDVKKKFNGRGIRDIGWDNFFSSRKENRWFIPAFHKAFSELSSNRGLCVIEVNPAWTSATCPDCGFCSKENRDGINFTCRKCGVSYHADIDVATLNIARVAVLGKPMSGPADRERLGDTKKPRVARSRKTMKRKDISNSTVEAMVTA

SEQ ID NO: 87 - protein, 765 aa, Unknown
  Description of Unknown: Cas-phi-4 sequence
MYSLEMADLKSEPSLLAKLLRDRFPGKYWLPKYWKLAEKKRLTGGEEAACEYMADKQLDSPPPNFRPPARCVILAKSRPFEDWPVHRVASKAQSFVIGLSEQGFAALRAAPPSTADARRDWLRSHGASEDDLMALEAQLLETIMGNAISLHGGVLKKIDNANVKAAKRLSGRNEARLNKGLQELPPEQEGSAYGADGLLVNPPGLNLNIYCRKSCCPKPVKNTARFVGHYPGYLRDSDSILISGTMDRLTIIEGMPGHIPAWQREQGLVKPGGRRRRLSGSESNMRQKVDPSTGPRRSTRSGTVNRSNQRTGRNGDPLLVEIRMKEDWVLLDARGLLRNLRWRESKRGLSCDHEDLSLSGLLALFSGDPVIDPVRNEVVFLYGEGIIPVRSTKPVGTRQSKKLLERQASMGPLTLISCDLGQTNLIAGRASAISLTHGSLGVRSSVRIELDPEIIKSFERLRKDADRLETEILTAAKETLSDEQRGEVNSHEKDSPQTAKASLCRELGLHPPSLPWGQMGPSTTFIADMLISHGRDDDAFLSHGEFPTLEKRKKFDKRFCLESRPLLSSETRKALNESLWEVKRTSSEYARLSQRKKEMARRAVNFVVEISRRKTGLSNVIVNIEDLNVRIFHGGGKQAPGWDGFFRPKSENRWFIQAIHKAFSDLAAHHGIPVIESDPQRTSMTCPECGHCDSKNRNGVRFLCKGCGASMDADFDAACRNLERVALTGKPMPKPSTSCERLLSATTGKVCSDHSLSHDAIEKAS

SEQ ID NO: 88 - protein, 793 aa, Unknown
  Description of Unknown: Cas-phi-5 sequence
MSSLPTPLELLKQKHADLFKGLQFSSKDNKMAGKVLKKDGEEAALAFLSERGVSRGELPNFRPPAKTLVVAQSRPFEEFPIYRVSEAIQLYVYSLSVKELETVPSGSSTKKEHQRFFQDSSVPDFGYTSVQGLNKIFGLARGIYLGVITRGENQLQKAKSKHEALNKKRRASGEAETEFDPTPYEYMTPERKLAKPPGVNHSIMCYVDISVDEFDFRNPDGIVLPSEYAGYCREINTAIEKGTVDRLGHLKGGPGYIPGHQRKESTTEGPKINFRKGRIRRSYTALYAKRDSRRVRQGKLALPSYRHHMMRLNSNAESAILAVIFFGKDWVVFDLRGLLRNVRWRNLFVDGSTPSTLLGMFGDPVIDPKRGVVAFCYKEQIVPVVSKSITKMVKAPELLNKLYLKSEDPLVLVAIDLGQTNPVGVGVYRVMNASLDYEVVTRFALESELLREIESYRQRTNAFEAQIRAETFDAMTSEEQEEITRVRAFSASKAKENVCHRFGMPVDAVDWATMGSNTIHIAKWVMRHGDPSLVEVLEYRKDNEIKLDKNGVPKKVKLTDKRIANLTSIRLRFSQETSKHYNDTMWELRRKHPVYQKLSKSKADFSRRVVNSIIRRVNHLVPRARIVFIIEDLKNLGKVFHGSGKRELGWDSYFEPKSENRWFIQVLHKAFSETGKHKGYYIIECWPNWTSCTCPKCSCCDSENRHGEVFRCLACGYTCNTDFGTAPDNLVKIATTGKGLPGPKKRCKGSSKGKNPKIARSSETGVSVTESGAPKVKKSSPTQTSQSSSQSAP

SEQ ID NO: 89 - protein, 441 aa, Unknown
  Description of Unknown: Cas-phi-6 sequence
MNKIEKEKTPLAKLMNENFAGLRFPFAIIKQAGKKLLKEGELKTIEYMTGKGSIEPLPNFKPPVKCLIVAKRRDLKYFPICKASCEIQSYVYSLNYKDFMDYFSTPMTSQKQHEEFFKKSGLNIEYQNVAGLNLIFNNVKNTYNGVILKVKNRNEKLKKKAIKNNYEFEEIKTFNDDGCLINKPGINNVIYCFQSISPKILKNITHLPKEYNDYDCSVDRNIIQKYVSRLDIPESQPGHVPEWQRKLPEFNNTNNPRRRRKWYSNGRNISKGYSVDQVNQAKIEDSLLAQIKIGEDWIILDIRGLLRDLNRRELISYKNKLTIKDVLGFFSDYPIIDIKKNLVTFCYKEGVIQVVSQKSIGNKKSKQLLEKLIENKPIALVSIDLGQTNPVSVKISKLNKINNKISIESFTYRFLNEEILKEIEKYRKDYDKLELKLINEA

SEQ ID NO: 90 - protein, 772 aa, Unknown
  Description of Unknown: Cas-phi-7 sequence
MSNTAVSTREHMSNKTTPPSPLSLLLRAHFPGLKFESQDYKIAGKKLRDGGPEAVISYLTGKGQAKLKDVKPPAKAFVIAQSRPFIEWDLVRVSRQIQEKIFGIPATKGRPKQDGLSETAFNEAVASLEVDGKSKLNEETRAAFYEVLGLDAPSLHAQAQNALIKSAISIREGVLKKVENRNEKNLSKTKRRKEAGEEATFVEEKAHDERGYLIHPPGVNQTIPGYQAVVIKSCPSDFIGLPSGCLAKESAEALTDYLPHDRMTIPKGQPGYVPEWQHPLLNRRKNRRRRDWYSASLNKPKATCSKRSGTPNRKNSRTDQIQSGRFKGAIPVLMRFQDEWVIIDIRGLLRNARYRKLLKEKSTIPDLLSLFTGDPSIDMRQGVCTFIYKAGQACSAKMVKTKNAPEILSELTKSGPVVLVSIDLGQTNPIAAKVSRVTQLSDGQLSHETLLRELLSNDSSDGKEIARYRVASDRLRDKLANLAVERLSPEHKSEILRAKNDTPALCKARVCAALGLNPEMIAWDKMTPYTEFLATAYLEKGGDRKVATLKPKNRPEMLRRDIKFKGTEGVRIEVSPEAAEAYREAQWDLQRTSPEYLRLSTWKQELTKRILNQLRHKAAKSSQCEVVVMAFEDLNIKMMHGNGKWADGGWDAFFIKKRENRWFMQAFHKSLTELGAHKGVPTIEVTPHRTSITCTKCGHCDKANRDGERFACQKCGFVAHADLEIATDNIERVALTGKPMPKPESERSGDAKKSVGARKAAFKPEEDAEAAE

SEQ ID NO: 91 - protein, 717 aa, Unknown
  Description of Unknown: Cas-phi-8 sequence
MIKPTVSQFLTPGFKLIRNHSRTAGLKLKNEGEEACKKFVRENEIPKDECPNFQGGPAIANIIAKSREFTEWEIYQSSLAIQEVIFTLPKDKLPEPILKEEWRAQWLSEHGLDTVPYKEAAGLNLIIKNAVNTYKGVQVKVDNKNKNNLAKINRKNEIAKLNGEQEISFEEIKAFDDKGYLLQKPSPNKSIYCYQSVSPKPFITSKYHNVNLPEEYIGYYRKSNEPIVSPYQFDRLRIPIGEPGYVPKWQYTFLSKKENKRRKLSKRIKNVSPILGIICIKKDWCVFDMRGLLRTNHWKKYHKPTDSINDLFDYFTGDPVIDTKANVVRFRYKMENGIVNYKPVREKKGKELLENICDQNGSCKLATVDVGQNNPVAIGLFELKKVNGELTKTLISRHPTPIDFCNKITAYRERYDKLESSIKLDAIKQLTSEQKIEVDNYNNNFTPQNTKQIVCSKLNINPNDLPWDKMISGTHFISEKAQVSNKSEIYFTSTDKGKTKDVMKSDYKWFQDYKPKLSKEVRDALSDIEWRLRRESLEFNKLSKSREQDARQLANWISSMCDVIGIENLVKKNNFFGGSGKREPGWDNFYKPKKENRWWINAIHKALTELSQNKGKRVILLPAMRTSITCPKCKYCDSKNRNGEKFNCLKCGIELNADIDVATENLATVAITAQSMPKPTCERSGDAKKPVRARKAKAPEFHDKLAPSYTVVLREAV

SEQ ID NO: 92 - protein, 793 aa, Unknown
  Description of Unknown: Cas-phi-9 sequence
MRSSREIGDKILMRQPAEKTAFQVFRQEVIGTQKLSGGDAKTAGRLYKQGKMEAAREWLLKGARDDVPPNFQPPAKCLVVAVSHPFEEWDISKTNHDVQAYIYAQPLQAEGHLNGLSEKWEDTSADQHKLWFEKTGVPDRGLPVQAINKIAKAAVNRAFGVVRKVENRNEKRRSRDNRIAEHNRENGLTEVVREAPEVATNADGFLLHPPGIDPSILSYASVSPVPYNSSKHSFVRLPEEYQAYNVEPDAPIPQFVVEDRFAIPPGQPGYVPEWQRLKCSTNKHRRMRQWSNQDYKPKAGRRAKPLEFQAHLTRERAKGALLVVMRIKEDWVVFDVRGLLRNVEWRKVLSEEAREKLTLKGLLDLFTGDPVIDTKRGIVTFLYKAEITKILSKRTVKTKNARDLLLRLTEPGEDGLRREVGLVAVDLGQTHPIAAAIYRIGRTSAGALESTVLHRQGLREDQKEKLKEYRKRHTALDSRLRKEAFETLSVEQQKEIVTVSGSGAQITKDKVCNYLGVDPSTLPWEKMGSYTHFISDDFLRRGGDPNIVHFDRQPKKGKVSKKSQRIKRSDSQWVGRMRPRLSQETAKARMEADWAAQNENEEYKRLARSKQELARWCVNTLLQNTRCITQCDEIVVVIEDLNVKSLHGKGAREPGWDNFFTPKTENRWFIQILHKTFSELPKHRGEHVIEGCPLRTSITCPACSYCDKNSRNGEKFVCVACGATFHADFEVATYNLVRLATTGMPMPKSLERQGGGEKAGGARKARKKAKQVEKIVVQANANVTMNGASLHSP

SEQ ID NO: 93 - protein, 812 aa, Unknown
  Description of Unknown: Cas-phi-10 sequence
MDMLDTETNYATETPAQQQDYSPKPPKKAQRAPKGFSKKARPEKKPPKPITLFTQKHFSGVRFLKRVIRDASKILKLSESRTITFLEQAIERDGSAPPDVTPPVHNTIMAVTRPFEEWPEVILSKALQKHCYALTKKIKIKTWPKKGPGKKCLAAWSARTKIPLIPGQVQATNGLFDRIGSIYDGVEKKVTNRNANKKLEYDEAIKEGRNPAVPEYETAYNIDGTLINKPGYNPNLYITQSRTPRLITEADRPLVEKILWQMVEKKTQSRNQARRARLEKAAHLQGLPVPKFVPEKVDRSQKIEIRIIDPLDKIEPYMPQDRMAIKASQDGHVPYWQRPFLSKRRNRRVRAGWGKQVSSIQAWLTGALLVIVRLGNEAFLADIRGALRNAQWRKLLKPDATYQSLFNLFTGDPVVNTRTNHLTMAYREGVVNIVKSRSFKGRQTREHLLTLLGQGKTVAGVSFDLGQKHAAGLLAAHFGLGEDGNPVFTPIQACFLPQRYLDSLTNYRNRYDALTLDMRRQSLLALTPAQQQEFADAQRDPGGQAKRACCLKLNLNPDEIRWDLVSGISTMISDLYIERGGDPRDVHQQVETKPKGKRKSEIRILKIRDGKWAYDFRPKIADETRKAQREQLWKLQKASSEFERLSRYKINIARAIANWALQWGRELSGCDIVIPVLEDLNVGSKFFDGKGKWLLGWDNRFTPKKENRWFIKVLHKAVAELAPHRGVPVYEVMPHRTSMTCPACHYCHPTNREGDRFECQSCHVVKNTDRDVAPYNILRVAVEGKTLDRWQAEKKPQAEPDRPMILIDNQES

SEQ ID NO: 94 - protein, 1300 aa, Francisella novicida
MSIYQEFVNKYSLSKTLRFELIPQGKTLENIKARGLILDDEKRAKDYKKAKQIIDKYHQFFIEEILSSVCISEDLLQNYSDVYFKLKKSDDDNLQKDFKSAKDTIKKQISEYIKDSEKFKNLFNQNLIDAKKGQESDLILWLKQSKDNGIELFKANSDITDIDEALEIIKSFKGWTTYFKGFHENRKNVYSSNDIPTSIIYRIVDDNLPKFLENKAKYESLKDKAPEAINYEQIKKDLAEELTFDIDYKTSEVNQRVFSLDEVFEIANFNNYLNQSGITKFNTIIGGKFVNGENTKRKGINEYINLYSQQINDKTLKKYKMSVLFKQILSDTESKSFVIDKLEDDSDVVTTMQSFYEQIAAFKTVEEKSIKETLSLLFDDLKAQKLDLSKIYFKNDKSLTDLSQQVFDDYSVIGTAVLEYITQQIAPKNLDNPSKKEQELIAKKTEKAKYLSLETIKLALEEFNKHRDIDKQCRFEEILANFAAIPMIFDEIAQNKDNLAQISIKYQNQGKKDLLQASAEDDVKAIKDLLDQTNNLLHKLKIFHISQSEDKANILDKDEHFYLVFEECYFELANIVPLYNKIRNYITQKPYSDEKFKLNFENSTLANGWDKNKEPDNTAILFIKDDKYYLGVMNKKNNKIFDDKAIKENKGEGYKKIVYKLLPGANKMLPKVFFSAKSIKFYNPSEDILRIRNHSTHTKNGSPQKGYEKFEFNIEDCRKFIDFYKQSISKHPEWKDFGFRFSDTQRYNSIDEFYREVENQGYKLTFENISESYIDSVVNQGKLYLFQIYNKDFSAYSKGRPNLHTLYWKALFDERNLQDVVYKLNGEAELFYRKQSIPKKITHPAKEAIANKNKDNPKKESVFEYDLIKDKRFTEDKFFFHCPITINFKSSGANKFNDEINLLLKEKANDVHILSIDRGERHLAYYTLVDGKGNIIKQDTFNIIGNDRMKTNYHDKLAAIEKDRDSARKDWKKINNIKEMKEGYLSQVVHEIAKLVIEYNAIVVFEDLNFGFKRGRFKVEKQVYQKLEKMLIEKLNYLVFKDNEFDKTGGVLRAYQLTAPFETFKKMGKQTGIIYYVPAGFTSKICPVTGFVNQLYPKYESVSKSQEFFSKFDKICYNLDKGYFEFSFDYKNFGDKAAKGKWTIASFGSRLINFRNSDKNHNWDTREVYPTKELEKLLKDYSIEYGHGECIKAAICGESDKKFFAKLTSVLNTILQMRNSKTGTELDYLISPVADVNGNFFDSRQAPKNMPQDADANGAYHIGLKGLMLLGRIKNNQEGKKLNLVIKNEEYFEFVQNRNN

SEQ ID NO: 95 - protein, 1300 aa, Francisella novicida
MSIYQEFVNKYSLSKTLRFELIPQGKTLENIKARGLILDDEKRAKDYKKAKQIIDKYHQFFIEEILSSVCISEDLLQNYSDVYFKLKKSDDDNLQKDFKSAKDTIKKQISEYIKDSEKFKNLFNQNLIDAKKGQESDLILWLKQSKDNGIELFKANSDITDIDEALEIIKSFKGWTTYFKGFHENRKNVYSSNDIPTSIIYRIVDDNLPKFLENKAKYESLKDKAPEAINYEQIKKDLAEELTFDIDYKTSEVNQRVFSLDEVFEIANFNNYLNQSGITKFNTIIGGKFVNGENTKRKGINEYINLYSQQINDKTLKKYKMSVLFKQILSDTESKSFVIDKLEDDSDVVTTMQSFYEQIAAFKTVEEKSIKETLSLLFDDLKAQKLDLSKIYFKNDKSLTDLSQQVFDDYSVIGTAVLEYITQQIAPKNLDNPSKKEQELIAKKTEKAKYLSLETIKLALEEFNKHRDIDKQCRFEEILANFAAIPMIFDEIAQNKDNLAQISIKYQNQGKKDLLQASAEDDVKAIKDLLDQTNNLLHKLKIFHISQSEDKANILDKDEHFYLVFEECYFELANIVPLYNKIRNYITQKPYSDEKFKLNFENSTLANGWDKNKEPDNTAILFIKDDKYYLGVMNKKNNKIFDDKAIKENKGEGYKKIVYKLLPGANKMLPKVFFSAKSIKFYNPSEDILRIRNHSTHTKNGSPQKGYEKFEFNIEDCRKFIDFYKQSISKHPEWKDFGFRFSDTQRYNSIDEFYREVENQGYKLTFENISESYIDSVVNQGKLYLFQIYNKDFSAYSKGRPNLHTLYWKALFDERNLQDVVYKLNGEAELFYRKQSIPKKITHPAKEAIANKNKDNPKKESVFEYDLIKDKRFTEDKFFFHCPITINFKSSGANKFNDEINLLLKEKANDVHILSIARGERHLAYYTLVDGKGNIIKQDTFNIIGNDRMKTNYHDKLAAIEKDRDSARKDWKKINNIKEMKEGYLSQVVHEIAKLVIEYNAIVVFEDLNFGFKRGRFKVEKQVYQKLEKMLIEKLNYLVFKDNEFDKTGGVLRAYQLTAPFETFKKMGKQTGIIYYVPAGFTSKICPVTGFVNQLYPKYESVSKSQEFFSKFDKICYNLDKGYFEFSFDYKNFGDKAAKGKWTIASFGSRLINFRNSDKNHNWDTREVYPTKELEKLLKDYSIEYGHGECIKAAICGESDKKFFAKLTSVLNTILQMRNSKTGTELDYLISPVADVNGNFFDSRQAPKNMPQDADANGAYHIGLKGLMLLGRIKNNQEGKKLNLVIKNEEYFEFVQNRNN

SEQ ID NO: 96 - protein, 1300 aa, Francisella novicida
MSIYQEFVNKYSLSKTLRFELIPQGKTLENIKARGLILDDEKRAKDYKKAKQIIDKYHQFFIEEILSSVCISEDLLQNYSDVYFKLKKSDDDNLQKDFKSAKDTIKKQISEYIKDSEKFKNLFNQNLIDAKKGQESDLILWLKQSKDNGIELFKANSDITDIDEALEIIKSFKGWTTYFKGFHENRKNVYSSNDIPTSIIYRIVDDNLPKFLENKAKYESLKDKAPEAINYEQIKKDLAEELTFDIDYKTSEVNQRVFSLDEVFEIANFNNYLNQSGITKFNTIIGGKFVNGENTKRKGINEYINLYSQQINDKTLKKYKMSVLFKQILSDTESKSFVIDKLEDDSDVVTTMQSFYEQIAAFKTVEEKSIKETLSLLFDDLKAQKLDLSKIYFKNDKSLTDLSQQVFDDYSVIGTAVLEYITQQIAPKNLDNPSKKEQELIAKKTEKAKYLSLETIKLALEEFNKHRDIDKQCRFEEILANFAAIPMIFDEIAQNKDNLAQISIKYQNQGKKDLLQASAEDDVKAIKDLLDQTNNLLHKLKIFHISQSEDKANILDKDEHFYLVFEECYFELANIVPLYNKIRNYITQKPYSDEKFKLNFENSTLANGWDKNKEPDNTAILFIKDDKYYLGVMNKKNNKIFDDKAIKENKGEGYKKIVYKLLPGANKMLPKVFFSAKSIKFYNPSEDILRIRNHSTHTKNGSPQKGYEKFEFNIEDCRKFIDFYKQSISKHPEWKDFGFRFSDTQRYNSIDEFYREVENQGYKLTFENISESYIDSVVNQGKLYLFQIYNKDFSAYSKGRPNLHTLYWKALFDERNLQDVVYKLNGEAELFYRKQSIPKKITHPAKEAIANKNKDNPKKESVFEYDLIKDKRFTEDKFFFHCPITINFKSSGANKFNDEINLLLKEKANDVHILSIDRGERHLAYYTLVDGKGNIIKQDTFNIIGNDRMKTNYHDKLAAIEKDRDSARKDWKKINNIKEMKEGYLSQVVHEIAKLVIEYNAIVVFADLNFGFKRGRFKVEKQVYQKLEKMLIEKLNYLVFKDNEFDKTGGVLRAYQLTAPFETFKKMGKQTGIIYYVPAGFTSKICPVTGFVNQLYPKYESVSKSQEFFSKFDKICYNLDKGYFEFSFDYKNFGDKAAKGKWTIASFGSRLINFRNSDKNHNWDTREVYPTKELEKLLKDYSIEYGHGECIKAAICGESDKKFFAKLTSVLNTILQMRNSKTGTELDYLISPVADVNGNFFDSRQAPKNMPQDADANGAYHIGLKGLMLLGRIKNNQEGKKLNLVIKNEEYFEFVQNRNN

SEQ ID NO: 97 - protein, 1300 aa, Francisella novicida
MSIYQEFVNKYSLSKTLRFELIPQGKTLENIKARGLILDDEKRAKDYKKAKQIIDKYHQFFIEEILSSVCISEDLLQNYSDVYFKLKKSDDDNLQKDFKSAKDTIKKQISEYIKDSEKFKNLFNQNLIDAKKGQESDLILWLKQSKDNGIELFKANSDITDIDEALEIIKSFKGWTTYFKGFHENRKNVYSSNDIPTSIIYRIVDDNLPKFLENKAKYESLKDKAPEAINYEQIKKDLAEELTFDIDYKTSEVNQRVFSLDEVFEIANFNNYLNQSGITKFNTIIGGKFVNGENTKRKGINEYINLYSQQINDKTLKKYKMSVLFKQILSDTESKSFVIDKLEDDSDVVTTMQSFYEQIAAFKTVEEKSIKETLSLLFDDLKAQKLDLSKIYFKNDKSLTDLSQQVFDDYSVIGTAVLEYITQQIAPKNLDNPSKKEQELIAKKTEKAKYLSLETIKLALEEFNKHRDIDKQCRFEEILANFAAIPMIFDEIAQNKDNLAQISIKYQNQGKKDLLQASAEDDVKAIKDLLDQTNNLLHKLKIFHISQSEDKANILDKDEHFYLVFEECYFELANIVPLYNKIRNYITQKPYSDEKFKLNFENSTLANGWDKNKEPDNTAILFIKDDKYYLGVMNKKNNKIFDDKAIKENKGEGYKKIVYKLLPGANKMLPKVFFSAKSIKFYNPSEDILRIRNHSTHTKNGSPQKGYEKFEFNIEDCRKFIDFYKQSISKHPEWKDFGFRFSDTQRYNSIDEFYREVENQGYKLTFENISESYIDSVVNQGKLYLFQIYNKDFSAYSKGRPNLHTLYWKALFDERNLQDVVYKLNGEAELFYRKQSIPKKITHPAKEAIANKNKDNPKKESVFEYDLIKDKRFTEDKFFFHCPITINFKSSGANKFNDEINLLLKEKANDVHILSIDRGERHLAYYTLVDGKGNIIKQDTFNIIGNDRMKTNYHDKLAAIEKDRDSARKDWKKINNIKEMKEGYLSQVVHEIAKLVIEYNAIVVFEDLNFGFKRGRFKVEKQVYQKLEKMLIEKLNYLVFKDNEFDKTGGVLRAYQLTAPFETFKKMGKQTGIIYYVPAGFTSKICPVTGFVNQLYPKYESVSKSQEFFSKFDKICYNLDKGYFEFSFDYKNFGDKAAKGKWTIASFGSRLINFRNSDKNHNWDTREVYPTKELEKLLKDYSIEYGHGECIKAAICGESDKKFFAKLTSVLNTILQMRNSKTGTELDYLISPVADVNGNFFDSRQAPKNMPQDAAANGAYHIGLKGLMLLGRIKNNQEGKKLNLVIKNEEYFEFVQNRNN

SEQ ID NO: 98 - protein, 1300 aa, Francisella novicida
MSIYQEFVNKYSLSKTLRFELIPQGKTLENIKARGLILDDEKRAKDYKKAKQIIDKYHQFFIEEILSSVCISEDLLQNYSDVYFKLKKSDDDNLQKDFKSAKDTIKKQISEYIKDSEKFKNLFNQNLIDAKKGQESDLILWLKQSKDNGIELFKANSDITDIDEALEIIKSFKGWTTYFKGFHENRKNVYSSNDIPTSIIYRIVDDNLPKFLENKAKYESLKDKAPEAINYEQIKKDLAEELTFDIDYKTSEVNQRVFSLDEVFEIANFNNYLNQSGITKFNTIIGGKFVNGENTKRKGINEYINLYSQQINDKTLKKYKMSVLFKQILSDTESKSFVIDKLEDDSDVVTTMQSFYEQIAAFKTVEEKSIKETLSLLFDDLKAQKLDLSKIYFKNDKSLTDLSQQVFDDYSVIGTAVLEYITQQIAPKNLDNPSKKEQELIAKKTEKAKYLSLETIKLALEEFNKHRDIDKQCRFEEILANFAAIPMIFDEIAQNKDNLAQISIKYQNQGKKDLLQASAEDDVKAIKDLLDQTNNLLHKLKIFHISQSEDKANILDKDEHFYLVFEECYFELANIVPLYNKIRNYITQKPYSDEKFKLNFENSTLANGWDKNKEPDNTAILFIKDDKYYLGVMNKKNNKIFDDKAIKENKGEGYKKIVYKLLPGANKMLPKVFFSAKSIKFYNPSEDILRIRNHSTHTKNGSPQKGYEKFEFNIEDCRKFIDFYKQSISKHPEWKDFGFRFSDTQRYNSIDEFYREVENQGYKLTFENISESYIDSVVNQGKLYLFQIYNKDFSAYSKGRPNLHTLYWKALFDERNLQDVVYKLNGEAELFYRKQSIPKKITHPAKEAIANKNKDNPKKESVFEYDLIKDKRFTEDKFFFHCPITINFKSSGANKFNDEINLLLKEKANDVHILSIARGERHLAYYTLVDGKGNIIKQDTFNIIGNDRMKTNYHDKLAAIEKDRDSARKDWKKINNIKEMKEGYLSQVVHEIAKLVIEYNAIVVFADLNFGFKRGRFKVEKQVYQKLEKMLIEKLNYLVFKDNEFDKTGGVLRAYQLTAPFETFKKMGKQTGIIYYVPAGFTSKICPVTGFVNQLYPKYESVSKSQEFFSKFDKICYNLDKGYFEFSFDYKNFGDKAAKGKWTIASFGSRLINFRNSDKNHNWDTREVYPTKELEKLLKDYSIEYGHGECIKAAICGESDKKFFAKLTSVLNTILQMRNSKTGTELDYLISPVADVNGNFFDSRQAPKNMPQDADANGAYHIGLKGLMLLGRIKNNQEGKKLNLVIKNEEYFEFVQNRNN

SEQ ID NO: 99 - protein, 1300 aa, Francisella novicida
MSIYQEFVNKYSLSKTLRFELIPQGKTLENIKARGLILDDEKRAKDYKKAKQIIDKYHQFFIEEILSSVCISEDLLQNYSDVYFKLKKSDDDNLQKDFKSAKDTIKKQISEYIKDSEKFKNLFNQNLIDAKKGQESDLILWLKQSKDNGIELFKANSDITDIDEALEIIKSFKGWTTYFKGFHENRKNVYSSNDIPTSIIYRIVDDNLPKFLENKAKYESLKDKAPEAINYEQIKKDLAEELTFDIDYKTSEVNQRVFSLDEVFEIANFNNYLNQSGITKFNTIIGGKFVNGENTKRKGINEYINLYSQQINDKTLKKYKMSVLFKQILSDTESKSFVIDKLEDDSDVVTTMQSFYEQIAAFKTVEEKSIKETLSLLFDDLKAQKLDLSKIYFKNDKSLTDLSQQVFDDYSVIGTAVLEYITQQIAPKNLDNPSKKEQELIAKKTEKAKYLSLETIKLALEEFNKHRDIDKQCRFEEILANFAAIPMIFDEIAQNKDNLAQISIKYQNQGKKDLLQASAEDDVKAIKDLLDQTNNLLHKLKIFHISQSEDKANILDKDEHFYLVFEECYFELANIVPLYNKIRNYITQKPYSDEKFKLNFENSTLANGWDKNKEPDNTAILFIKDDKYYLGVMNKKNNKIFDDKAIKENKGEGYKKIVYKLLPGANKMLPKVFFSAKSIKFYNPSEDILRIRNHSTHTKNGSPQKGYEKFEFNIEDCRKFIDFYKQSISKHPEWKDFGFRFSDTQRYNSIDEFYREVENQGYKLTFENISESYIDSVVNQGKLYLFQIYNKDFSAYSKGRPNLHTLYWKALFDERNLQDVVYKLNGEAELFYRKQSIPKKITHPAKEAIANKNKDNPKKESVFEYDLIKDKRFTEDKFFFHCPITINFKSSGANKFNDEINLLLKEKANDVHILSIARGERHLAYYTLVDGKGNIIKQDTFNIIGNDRMKTNYHDKLAAIEKDRDSARKDWKKINNIKEMKEGYLSQVVHEIAKLVIEYNAIVVFEDLNFGFKRGRFKVEKQVYQKLEKMLIEKLNYLVFKDNEFDKTGGVLRAYQLTAPFETFKKMGKQTGIIYYVPAGFTSKICPVTGFVNQLYPKYESVSKSQEFFSKFDKICYNLDKGYFEFSFDYKNFGDKAAKGKWTIASFGSRLINFRNSDKNHNWDTREVYPTKELEKLLKDYSIEYGHGECIKAAICGESDKKFFAKLTSVLNTILQMRNSKTGTELDYLISPVADVNGNFFDSRQAPKNMPQDAAANGAYHIGLKGLMLLGRIKNNQEGKKLNLVIKNEEYFEFVQNRNN

SEQ ID NO: 100 - protein, 1300 aa, Francisella novicida
MSIYQEFVNKYSLSKTLRFELIPQGKTLENIKARGLILDDEKRAKDYKKAKQIIDKYHQFFIEEILSSVCISEDLLQNYSDVYFKLKKSDDDNLQKDFKSAKDTIKKQISEYIKDSEKFKNLFNQNLIDAKKGQESDLILWLKQSKDNGIELFKANSDITDIDEALEIIKSFKGWTTYFKGFHENRKNVYSSNDIPTSIIYRIVDDNLPKFLENKAKYESLKDKAPEAINYEQIKKDLAEELTFDIDYKTSEVNQRVFSLDEVFEIANFNNYLNQSGITKFNTIIGGKFVNGENTKRKGINEYINLYSQQINDKTLKKYKMSVLFKQILSDTESKSFVIDKLEDDSDVVTTMQSFYEQIAAFKTVEEKSIKETLSLLFDDLKAQKLDLSKIYFKNDKSLTDLSQQVFDDYSVIGTAVLEYITQQIAPKNLDNPSKKEQELIAKKTEKAKYLSLETIKLALEEFNKHRDIDKQCRFEEILANFAAIPMIFDEIAQNKDNLAQISIKYQNQGKKDLLQASAEDDVKAIKDLLDQTNNLLHKLKIFHISQSEDKANILDKDEHFYLVFEECYFELANIVPLYNKIRNYITQKPYSDEKFKLNFENSTLANGWDKNKEPDNTAILFIKDDKYYLGVMNKKNNKIFDDKAIKENKGEGYKKIVYKLLPGANKMLPKVFFSAKSIKFYNPSEDILRIRNHSTHTKNGSPQKGYEKFEFNIEDCRKFIDFYKQSISKHPEWKDFGFRFSDTQRYNSIDEFYREVENQGYKLTFENISESYIDSVVNQGKLYLFQIYNKDFSAYSKGRPNLHTLYWKALFDERNLQDVVYKLNGEAELFYRKQSIPKKITHPAKEAIANKNKDNPKKESVFEYDLIKDKRFTEDKFFFHCPITINFKSSGANKFNDEINLLLKEKANDVHILSIDRGERHLAYYTLVDGKGNIIKQDTFNIIGNDRMKTNYHDKLAAIEKDRDSARKDWKKINNIKEMKEGYLSQVVHEIAKLVIEYNAIVVFADLNFGFKRGRFKVEKQVYQKLEKMLIEKLNYLVFKDNEFDKTGGVLRAYQLTAPFETFKKMGKQTGIIYYVPAGFTSKICPVTGFVNQLYPKYESVSKSQEFFSKFDKICYNLDKGYFEFSFDYKNFGDKAAKGKWTIASFGSRLINFRNSDKNHNWDTREVYPTKELEKLLKDYSIEYGHGECIKAAICGESDKKFFAKLTSVLNTILQMRNSKTGTELDYLISPVADVNGNFFDSRQAPKNMPQDAAANGAYHIGLKGLMLLGRIKNNQEGKKLNLVIKNEEYFEFVQNRNN

SEQ ID NO: 101 - protein, 1300 aa, Francisella novicida
MSIYQEFVNKYSLSKTLRFELIPQGKTLENIKARGLILDDEKRAKDYKKAKQIIDKYHQFFIEEILSSVCISEDLLQNYSDVYFKLKKSDDDNLQKDFKSAKDTIKKQISEYIKDSEKFKNLFNQNLIDAKKGQESDLILWLKQSKDNGIELFKANSDITDIDEALEIIKSFKGWTTYFKGFHENRKNVYSSNDIPTSIIYRIVDDNLPKFLENKAKYESLKDKAPEAINYEQIKKDLAEELTFDIDYKTSEVNQRVFSLDEVFEIANFNNYLNQSGITKFNTIIGGKFVNGENTKRKGINEYINLYSQQINDKTLKKYKMSVLFKQILSDTESKSFVIDKLEDDSDVVTTMQSFYEQIAAFKTVEEKSIKETLSLLFDDLKAQKLDLSKIYFKNDKSLTDLSQQVFDDYSVIGTAVLEYITQQIAPKNLDNPSKKEQELIAKKTEKAKYLSLETIKLALEEFNKHRDIDKQCRFEEILANFAAIPMIFDEIAQNKDNLAQISIKYQNQGKKDLLQASAEDDVKAIKDLLDQTNNLLHKLKIFHISQSEDKANILDKDEHFYLVFEECYFELANIVPLYNKIRNYITQKPYSDEKFKLNFENSTLANGWDKNKEPDNTAILFIKDDKYYLGVMNKKNNKIFDDKAIKENKGEGYKKIVYKLLPGANKMLPKVFFSAKSIKFYNPSEDILRIRNHSTHTKNGSPQKGYEKFEFNIEDCRKFIDFYKQSISKHPEWKDFGFRFSDTQRYNSIDEFYREVENQGYKLTFENISESYIDSVVNQGKLYLFQIYNKDFSAYSKGRPNLHTLYWKALFDERNLQDVVYKLNGEAELFYRKQSIPKKITHPAKEAIANKNKDNPKKESVFEYDLIKDKRFTEDKFFFHCPITINFKSSGANKFNDEINLLLKEKANDVHILSIARGERHLAYYTLVDGKGNIIKQDTFNIIGNDRMKTNYHDKLAAIEKDRDSARKDWKKINNIKEMKEGYLSQVVHEIAKLVIEYNAIVVFADLNFGFKRGRFKVEKQVYQKLEKMLIEKLNYLVFKDNEFDKTGGVLRAYQLTAPFETFKKMGKQTGIIYYVPAGFTSKICPVTGFVNQLYPKYESVSKSQEFFSKFDKICYNLDKGYFEFSFDYKNFGDKAAKGKWTIASFGSRLINFRNSDKNHNWDTREVYPTKELEKLLKDYSIEYGHGECIKAAICGESDKKFFAKLTSVLNTILQMRNSKTGTELDYLISPVADVNGNFFDSRQAPKNMPQDAAANGAYHIGLKGLMLLGRIKNNQEGKKLNLVIKNEEYFEFVQNRNN

SEQ ID NO: 102 - protein, 1053 aa, Staphylococcus aureus
MKRNYILGLDIGITSVGYGIIDYETRDVIDAGVRLFKEANVENNEGRRSKRGARRLKRRRRHRIQRVKKLLFDYNLLTDHSELSGINPYEARVKGLSQKLSEEEFSAALLHLAKRRGVHNVNEVEEDTGNELSTKEQISRNSKALEEKYVAELQLERLKKDGEVRGSINRFKTSDYVKEAKQLLKVQKAYHQLDQSFIDTYIDLLETRRTYYEGPGEGSPFGWKDIKEWYEMLMGHCTYFPEELRSVKYAYNADLYNALNDLNNLVITRDENEKLEYYEKFQIIENVFKQKKKPTLKQIAKEILVNEEDIKGYRVTSTGKPEFTNLKVYHDIKDITARKEIIENAELLDQIAKILTIYQSSEDIQEELTNLNSELTQEEIEQISNLKGYTGTHNLSLKAINLILDELWHTNDNQIAIFNRLKLVPKKVDLSQQKEIPTTLVDDFILSPVVKRSFIQSIKVINAIIKKYGLPNDIIIELAREKNSKDAQKMINEMQKRNRQTNERIEEIIRTTGKENAKYLIEKIKLHDMQEGKCLYSLEAIPLEDLLNNPFNYEVDHIIPRSVSFDNSFNNKVLVKQEENSKKGNRTPFQYLSSSDSKISYETFKKHILNLAKGKGRISKTKKEYLLEERDINRFSVQKDFINRNLVDTRYATRGLMNLLRSYFRVNNLDVKVKSINGGFTSFLRRKWKFKKERNKGYKHHAEDALIIANADFIFKEWKKLDKAKKVMENQMFEEKQAESMPEIETEQEYKEIFITPHQIKHIKDFKDYKYSHRVDKKPNRELINDTLYSTRKDDKGNTLIVNNLNGLYDKDNDKLKKLINKSPEKLLMYHHDPQTYQKLKLIMEQYGDEKNPLYKYYEETGNYLTKYSKKDNGPVIKKIKYYGNKLNAHLDITDDYPNSRNKVVKLSLKPYRFDVYLDNGVYKFVTVKNLDVIKKENYYEVNSKCYEEAKKLKKISNQAEFIASFYNNDLIKINGELYRVIGVNNDLLNRIEVNMIDITYREYLENMNDKRPPRIIKTIASKTQSIKKYSTDILGNLYEVKSKKHPQIIKKG

SEQ ID NO: 103 - protein, 1052 aa, Staphylococcus aureus
KRNYILGLDIGITSVGYGIIDYETRDVIDAGVRLFKEANVENNEGRRSKRGARRLKRRRRHRIQRVKKLLFDYNLLTDHSELSGINPYEARVKGLSQKLSEEEFSAALLHLAKRRGVHNVNEVEEDTGNELSTKEQISRNSKALEEKYVAELQLERLKKDGEVRGSINRFKTSDYVKEAKQLLKVQKAYHQLDQSFIDTYIDLLETRRTYYEGPGEGSPFGWKDIKEWYEMLMGHCTYFPEELRSVKYAYNADLYNALNDLNNLVITRDENEKLEYYEKFQIIENVFKQKKKPTLKQIAKEILVNEEDIKGYRVTSTGKPEFTNLKVYHDIKDITARKEIIENAELLDQIAKILTIYQSSEDIQEELTNLNSELTQEEIEQISNLKGYTGTHNLSLKAINLILDELWHTNDNQIAIFNRLKLVPKKVDLSQQKEIPTTLVDDFILSPVVKRSFIQSIKVINAIIKKYGLPNDIIIELAREKNSKDAQKMINEMQKRNRQTNERIEEIIRTTGKENAKYLIEKIKLHDMQEGKCLYSLEAIPLEDLLNNPFNYEVDHIIPRSVSFDNSFNNKVLVKQEEASKKGNRTPFQYLSSSDSKISYETFKKHILNLAKGKGRISKTKKEYLLEERDINRFSVQKDFINRNLVDTRYATRGLMNLLRSYFRVNNLDVKVKSINGGFTSFLRRKWKFKKERNKGYKHHAEDALIIANADFIFKEWKKLDKAKKVMENQMFEEKQAESMPEIETEQEYKEIFITPHQIKHIKDFKDYKYSHRVDKKPNRELINDTLYSTRKDDKGNTLIVNNLNGLYDKDNDKLKKLINKSPEKLLMYHHDPQTYQKLKLIMEQYGDEKNPLYKYYEETGNYLTKYSKKDNGPVIKKIKYYGNKLNAHLDITDDYPNSRNKVVKLSLKPYRFDVYLDNGVYKFVTVKNLDVIKKENYYEVNSKCYEEAKKLKKISNQAEFIASFYNNDLIKINGELYRVIGVNNDLLNRIEVNMIDITYREYLENMNDKRPPRIIKTIASKTQSIKKYSTDILGNLYEVKSKKHPQIIKKG

SEQ ID NO: 104 - protein, 1052 aa, Staphylococcus aureus
KRNYILGLDIGITSVGYGIIDYETRDVIDAGVRLFKEANVENNEGRRSKRGARRLKRRRRHRIQRVKKLLFDYNLLTDHSELSGINPYEARVKGLSQKLSEEEFSAALLHLAKRRGVHNVNEVEEDTGNELSTKEQISRNSKALEEKYVAELQLERLKKDGEVRGSINRFKTSDYVKEAKQLLKVQKAYHQLDQSFIDTYIDLLETRRTYYEGPGEGSPFGWKDIKEWYEMLMGHCTYFPEELRSVKYAYNADLYNALNDLNNLVITRDENEKLEYYEKFQIIENVFKQKKKPTLKQIAKEILVNEEDIKGYRVTSTGKPEFTNLKVYHDIKDITARKEIIENAELLDQIAKILTIYQSSEDIQEELTNLNSELTQEEIEQISNLKGYTGTHNLSLKAINLILDELWHTNDNQIAIFNRLKLVPKKVDLSQQKEIPTTLVDDFILSPVVKRSFIQSIKVINAIIKKYGLPNDIIIELAREKNSKDAQKMINEMQKRNRQTNERIEEIIRTTGKENAKYLIEKIKLHDMQEGKCLYSLEAIPLEDLLNNPFNYEVDHIIPRSVSFDNSFNNKVLVKQEEASKKGNRTPFQYLSSSDSKISYETFKKHILNLAKGKGRISKTKKEYLLEERDINRFSVQKDFINRNLVDTRYATRGLMNLLRSYFRVNNLDVKVKSINGGFTSFLRRKWKFKKERNKGYKHHAEDALIIANADFIFKEWKKLDKAKKVMENQMFEEKQAESMPEIETEQEYKEIFITPHQIKHIKDFKDYKYSHRVDKKPNRKLINDTLYSTRKDDKGNTLIVNNLNGLYDKDNDKLKKLINKSPEKLLMYHHDPQTYQKLKLIMEQYGDEKNPLYKYYEETGNYLTKYSKKDNGPVIKKIKYYGNKLNAHLDITDDYPNSRNKVVKLSLKPYRFDVYLDNGVYKFVTVKNLDVIKKENYYEVNSKCYEEAKKLKKISNQAEFIASFYKNDLIKINGELYRVIGVNNDLLNRIEVNMIDITYREYLENMNDKRPPHIIKTIASKTQSIKKYSTDILGNLYEVKSKKHPQIIKKG

SEQ ID NO: 105 - protein, 1368 aa, Artificial Sequence
  Description of Artificial Sequence: Synthetic polypeptide
MDKKYSIGLAIGTNSVGWAVITDEYKVPSKKFKVLGNTDRHSIKKNLIGALLFDSGETAEATRLKRTARRRYTRRKNRICYLQEIFSNEMAKVDDSFFHRLEESFLVEEDKKHERHPIFGNIVDEVAYHEKYPTIYHLRKKLVDSTDKADLRLIYLALAHMIKFRGHFLIEGDLNPDNSDVDKLFIQLVQTYNQLFEENPINASGVDAKAILSARLSKSRRLENLIAQLPGEKKNGLFGNLIALSLGLTPNFKSNFDLAEDAKLQLSKDTYDDDLDNLLAQIGDQYADLFLAAKNLSDAILLSDILRVNTEITKAPLSASMIKRYDEHHQDLTLLKALVRQQLPEKYKEIFFDQSKNGYAGYIDGGASQEEFYKFIKPILEKMDGTEELLVKLNREDLLRKQRTFDNGSIPHQIHLGELHAILRRQEDFYPFLKDNREKIEKILTFRIPYYVGPLARGNSRFAWMTRKSEETITPWNFEEVVDKGASAQSFIERMTAFDKNLPNEKVLPKHSLLYEYFTVYNELTKVKYVTEGMRKPAFLSGEQKKAIVDLLFKTNRKVTVKQLKEDYFKKIECFDSVEISGVEDRFNASLGTYHDLLKIIKDKDFLDNEENEDILEDIVLTLTLFEDREMIEERLKTYAHLFDDKVMKQLKRRRYTGWGALSRKLINGIRDKQSGKTILDFLKSDGFANRNFMALIHDDSLTFKEDIQKAQVSGQGDSLHEHIANLAGSPAIKKGILQTVKVVDELVKVMGRHKPENIVIEMARENQTTQKGQKNSRERMKRIEEGIKELGSQILKEHPVENTQLQNEKLYLYYLQNGRDMYVDQELDINRLSDYDVDHIVPQSFLKDDSIDNKVLTRSDKNRGKSDNVPSEEVVKKMKNYWRQLLNAKLITQRKFDNLTKAERGGLSELDKAGFIKRQLVETRAITKHVAQILDSRMNTKYDENDKLIREVKVITLKSKLVSDFRKDFQFYKVREINNYHHAHDAYLNAVVGTALIKKYPKLESEFVYGDYKVYDVRKMIAKSEQEIGKATAKYFFYSNIMNFFKTEITLANGEIRKRPLIETNGETGEIVWDKGRDFATVRKVLSMPQVNIVKKTEVQTGGFSKESILPKRNSDKLIARKKDWDPKKYGGFDSPTVAYSVLVVAKVEKGKSKKLKSVKELLGITIMERSSFEKNPIDFLEAKGYKEVKKDLIIKLPKYSLFELENGRKRMLASAGELQKGNELALPSKYVNFLYLASHYEKLKGSPEDNEQKQLFVEQHKHYLDEIIEQISEFSKRVILADANLDKVLSAYNKHRDKPIREQAENIIHLFTLTNLGAPAAFKYFDTTIDRKRYTSTKEVLDATLIHQSITGLYETRIDLSQLGGD

SEQ ID NO: 106 - protein, 1367 aa, Streptococcus pyogenes
MDKKYSIGLAIGTNSVGWAVITDEYKVPSKKFKVLGNTDRHSIKKNLIGALLFDSGETAEATRLKRTARRRYTRRKNRICYLQEIFSNEMAKVDDSFFHRLEESFVEEDKKHERHPIFGNIVDEVAYHEKYPTIYHLRKKLVDSTDKADLRLIYLALAHMIKFRGHFLIEGDLNPDNSDVDKLFIQLVQTYNQLFEENPINASGVDAKAILSARLSKSRRLENLIAQLPGEKKNGLFGNLIALSLGLTPNFKSNFDLAEDAKLQLSKDTYDDDLDNLLAQIGDQYADLFLAAKNLSDAILLSDILRVNTEITKAPLSASMIKRYDEHHQDLTLLKALVRQQLPEKYKEIFFDQSKNGYAGYIDGGASQEEFYKFIKPILEKMDGTEELLVKLNREDLLRKQRTFDNGSIPHQIHLGELHAILRRQEDFYPFLKDNREKIEKILTFRIPYYVGPLARGNSRFAWMTRKSEETITPWNFEEVVDKGASAQSFIERMTNFDKNLPNEKVLPKHSLLYEYFTVYNELTKVKYVTEGMRKPAFLSGEQKKAIVDLLFKTNRKVTVKQLKEDYFKKIECFDSVEISGVEDRFNASLGTYHDLLKIIKDKDFLDNEENEDILEDIVLTLTLFEDREMIEERLKTYAHLFDDKVMKQLKRRRYTGWGRLSRKLINGIRDKQSGKTILDFLKSDGFANRNFMQLIHDDSLTFKEDIQKAQVSGQGDSLHEHIANLAGSPAIKKGILQTVKVVDELVKVMGRHKPENIVIEMARENQTTQKGQKNSRERMKRIEEGIKELGSQILKEHPVENTQLQNEKLYLYYLQNGRDMYVDQELDINRLSDYDVDHIVPQSFLKDDSIDNKVLTRSDKNRGKSDNVPSEEVVKKMKNYWRQLLNAKLITQRKFDNLTKAERGGLSELDKAGFIKRQLVETRQITKHVAQILDSRMNTKYDENDKLIREVKVITLKSKLVSDFRKDFQFYKVREINNYHHAHDAYLNAVVGTALIKKYPKLESEFVYGDYKVYDVRKMIAKSEQEIGKATAKYFFYSNIMNFFKTEITLANGEIRKRPLIETNGETGEIVWDKGRDFATVRKVLSMPQVNIVKKTEVQTGGFSKESILPKRNSDKLIARKKDWDPKKYGGFESPTVAYSVLVVAKVEKGKSKKLKSVKELLGITIMERSSFEKNPIDFLEAKGYKEVKKDLIIKLPKYSLFELENGRKRMLASAGELQKGNELALPSKYVNFLYLASHYEKLKGSPEDNEQKQLFVEQHKHYLDEIIEQISEFSKRVILADANLDKVLSAYNKHRDKPIREQAENIIHLFTLTNLGAPAAFKYFDTTIDRKQYRSTKEVLDATLIHQSITGLYETRIDLSQLGGD

SEQ ID NO: 107 - protein, 1368 aa, Streptococcus pyogenes
MDKKYSIGLAIGTNSVGWAVITDEYKVPSKKFKVLGNTDRHSIKKNLIGALLFDSGETAEATRLKRTARRRYTRRKNRICYLQEIFSNEMAKVDDSFFHRLEESFLVEEDKKHERHPIFGNIVDEVAYHEKYPTIYHLRKKLVDSTDKADLRLIYLALAHMIKFRGHFLIEGDLNPDNSDVDKLFIQLVQTYNQLFEENPINASGVDAKAILSARLSKSRRLENLIAQLPGEKKNGLFGNLIALSLGLTPNFKSNFDLAEDAKLQLSKDTYDDDLDNLLAQIGDQYADLFLAAKNLSDAILLSDILRVNTEITKAPLSASMIKRYDEHHQDLTLLKALVRQQLPEKYKEIFFDQSKNGYAGYIDGGASQEEFYKFIKPILEKMDGTEELLVKLNREDLLRKQRTFDNGSIPHQIHLGELHAILRRQEDFYPFLKDNREKIEKILTFRIPYYVGPLARGNSRFAWMTRKSEETITPWNFEEVVDKGASAQSFIERMTNFDKNLPNEKVLPKHSLLYEYFTVYNELTKVKYVTEGMRKPAFLSGEQKKAIVDLLFKTNRKVTVKQLKEDYFKKIECFDSVEISGVEDRFNASLGTYHDLLKIIKDKDFLDNEENEDILEDIVLTLTLFEDREMIEERLKTYAHLFDDKVMKQLKRRRYTGWGRLSRKLINGIRDKQSGKTILDFLKSDGFANRNFMQLIHDDSLTFKEDIQKAQVSGQGDSLHEHIANLAGSPAIKKGILQTVKVVDELVKVMGRHKPENIVIEMARENQTTQKGQKNSRERMKRIEEGIKELGSQILKEHPVENTQLQNEKLYLYYLQNGRDMYVDQELDINRLSDYDVDHIVPQSFLKDDSIDNKVLTRSDKNRGKSDNVPSEEVVKKMKNYWRQLLNAKLITQRKFDNLTKAERGGLSELDKAGFIKRQLVETRQITKHVAQILDSRMNTKYDENDKLIREVKVITLKSKLVSDFRKDFQFYKVREINNYHHAHDAYLNAVVGTALIKKYPKLESEFVYGDYKVYDVRKMIAKSEQEIGKATAKYFFYSNIMNFFKTEITLANGEIRKRPLIETNGETGEIVWDKGRDFATVRKVLSMPQVNIVKKTEVQTGGFSKESILPKRNSDKLIARKKDWDPKKYGGFVSPTVAYSVLVVAKVEKGKSKKLKSVKELLGITIMERSSFEKNPIDFLEAKGYKEVKKDLIIKLPKYSLFELENGRKRMLASAGELQKGNELALPSKYVNFLYLASHYEKLKGSPEDNEQKQLFVEQHKHYLDEIIEQISEFSKRVILADANLDKVLSAYNKHRDKPIREQAENIIHLFTLTNLGAPAAFKYFDTTIDRKQYRSTKEVLDATLIHQSITGLYETRIDLSQLGGD

SEQ ID NO: 108 - protein, 1368 aa, Streptococcus pyogenes
MDKKYSIGLAIGTNSVGWAVITDEYKVPSKKFKVLGNTDRHSIKKNLIGALLFDSGETAEATRLKRTARRRYTRRKNRICYLQEIFSNEMAKVDDSFFHRLEESFLVEEDKKHERHPIFGNIVDEVAYHEKYPTIYHLRKKLVDSTDKADLRLIYLALAHMIKFRGHFLIEGDLNPDNSDVDKLFIQLVQTYNQLFEENPINASGVDAKAILSARLSKSRRLENLIAQLPGEKKNGLFGNLIALSLGLTPNFKSNFDLAEDAKLQLSKDTYDDDLDNLLAQIGDQYADLFLAAKNLSDAILLSDILRVNTEITKAPLSASMIKRYDEHHQDLTLLKALVRQQLPEKYKEIFFDQSKNGYAGYIDGGASQEEFYKFIKPILEKMDGTEELLVKLNREDLLRKQRTFDNGSIPHQIHLGELHAILRRQEDFYPFLKDNREKIEKILTFRIPYYVGPLARGNSRFAWMTRKSEETITPWNFEEVVDKGASAQSFIERMTNFDKNLPNEKVLPKHSLLYEYFTVYNELTKVKYVTEGMRKPAFLSGEQKKAIVDLLFKTNRKVTVKQLKEDYFKKIECFDSVEISGVEDRFNASLGTYHDLLKIIKDKDFLDNEENEDILEDIVLTLTLFEDREMIEERLKTYAHLFDDKVMKQLKRRRYTGWGRLSRKLINGIRDKQSGKTILDFLKSDGFANRNFMQLIHDDSLTFKEDIQKAQVSGQGDSLHEHIANLAGSPAIKKGILQTVKVVDELVKVMGRHKPENIVIEMARENQTTQKGQKNSRERMKRIEEGIKELGSQILKEHPVENTQLQNEKLYLYYLQNGRDMYVDQELDINRLSDYDVDHIVPQSFLKDDSIDNKVLTRSDKNRGKSDNVPSEEVVKKMKNYWRQLLNAKLITQRKFDNLTKAERGGLSELDKAGFIKRQLVETRQITKHVAQILDSRMNTKYDENDKLIREVKVITLKSKLVSDFRKDFQFYKVREINNYHHAHDAYLNAVVGTALIKKYPKLESEFVYGDYKVYDVRKMIAKSEQEIGKATAKYFFYSNIMNFFKTEITLANGEIRKRPLIETNGETGEIVWDKGRDFATVRKVLSMPQVNIVKKTEVQTGGFSKESILPKRNSDKLIARKKDWDPKKYGGFVSPTVAYSVLVVAKVEKGKSKKLKSVKELLGITIMERSSFEKNPIDFLEAKGYKEVKKDLIIKLPKYSLFELENGRKRMLASARELQKGNELALPSKYVNFLYLASHYEKLKGSPEDNEQKQLFVEQHKHYLDEIIEQISEFSKRVILADANLDKVLSAYNKHRDKPIREQAENIIHLFTLTNLGAPAAFKYFDTTIDRKEYRSTKEVLDATLIHQSITGLYETRIDLSQLGGD

SEQ ID NO: 109 - protein, 1359 aa, Artificial Sequence
  Description of Artificial Sequence: Synthetic polypeptide
MDKKYSIGLDIGTNSVGWAVITDDYKVPSKKFKVLGNTDRHSIKKNLIGALLFGSGETAEATRLKRTARRRYTRRKNRICYLQEIFSNEMAKVDDSFFHRLEESFLVEEDKKHERHPIFGNIVDEVAYHEKYPTIYHLRKKLADSTDKADLRLIYLALAHMIKFRGHFLIEGDLNPDNSDVDKLFIQLVQIYNQLFEENPINASRVDAKAILSARLSKSRRLENLIAQLPGEKRNGLFGNLIALSLGLTPNFKSNFDLAEDAKLQLSKDTYDDDLDNLLAQIGDQYADLFLAAKNLSDAILLSDILRVNSEITKAPLSASMIKRYDEHHQDLTLLKALVRQQLPEKYKEIFFDQSKNGYAGYIDGGASQEEFYKFIKPILEKMDGTEELLVKLNREDLLRKQRTFDNGSIPHQIHLGELHAILRRQEDFYPFLKDNREKIEKILTFRIPYYVGPLARGNSRFAWMTRKSEETITPWNFEEVVDKGASAQSFIERMTNFDKNLPNEKVLPKHSLLYEYFTVYNELTKVKYVTEGMRKPAFLSGEQKKAIVDLLFKTNRKVTVKQLKEDYFKKIECFDSVEISGVEDRFNASLGAYHDLLKIIKDKDFLDNEENEDILEDIVLTLTLFEDRGMIEERLKTYAHLFDDKVMKQLKRRRYTGWGRLSRKLINGIRDKQSGKTILDFLKSDGFANRNFMQLIHDDSLTFKEDIQKAQVSGQGHSLHEQIANLAGSPAIKKGILQTVKIVDELVKVMGHKPENIVIEMARENQTTQKGQKNSRERMKRIEEGIKELGSQILKEHPVENTQLQNEKLYLYYLQNGRDMYVDQELDINRLSDYDVDHIVPQSFIKDDSIDNKVLTRSDKNRGKSDNVPSEEVVKKMKNYWRQLLNAKLITQRKFDNLTKAERGGLSELDKAGFIKRQLVETRQITKHVAQILDSRMNTKYDENDKLIREVKVITLKSKLVSDFRKDFQFYKVREINNYHHAHDAYLNAVVGTALIKKYPKLESEFVYGDYKVYDVRKMIAKSEQEIGKATAKYFFYSNIMNFFKTEITLANGEIRKRPLIETNGETGEIVWDKGRDFATVRKVLSMPQVNIVKKTEIQTVGQNGGLFDDNPKSPLEVTPSKLVPLKKELNPKKYGGYQKPTTAYPVLLITDTKQLIPISVMNKKQFEQNPVKFLRDRGYQQVGKNDFIKLPKYTLVDIGDGIKRLWASSKEIHKGNQLVVSKKSQILLYHAHHLDSDLSNDYLQNHNQQFDVLFNEIISFSKKCKLGKEHIQKIENVYSNKKNSASIEELAESFIKLLGFTQLGATSPFNFLGVKLNQKQYKGKKDYILPCTEGTLIRQSITGLYETRVDLSKIGED

SEQ ID NO: 110 - protein, 29 aa, Unknown
  Description of Unknown: nuclear localization sequence
PKKKRKVEGADKRTADGSEFESPKKKRKV

SEQ ID NO: 111 - protein, 23 aa, Unknown
  Description of Unknown: nuclear localization sequence
RKSGKIAAIVVKRPRKPKKKRKV

SEQ ID NO: 112 - protein, 4 aa, Artificial Sequence
  Description of Artificial Sequence: Synthetic peptide
GGGS

SEQ ID NO: 113 - protein, 5 aa, Artificial Sequence
  Description of Artificial Sequence: Synthetic peptide
GGGGS

SEQ ID NO: 114 - protein, 5 aa, Artificial Sequence
  Description of Artificial Sequence: Synthetic peptide
EAAAK

SEQ ID NO: 115 - protein, 6 aa, Artificial Sequence
  Description of Artificial Sequence: Synthetic peptide
GGSGGS

SEQ ID NO: 116 - protein, 20 aa, Artificial Sequence
  Description of Artificial Sequence: Synthetic peptide
GSSGSETPGTSESATPESSG

SEQ ID NO: 117 - DNA, 18 bp, Artificial Sequence
  Description of Artificial Sequence: Synthetic oligonucleotide
ggaggctctggaggaagc

SEQ ID NO: 118 - DNA, 60 bp, Artificial Sequence
  Description of Artificial Sequence: Synthetic oligonucleotide
ggctcttctggatctgaaacacctggcacaagcgagagcgccacccctgagagctctggc

SEQ ID NO: 119 - protein, 17 aa, Unknown
  Description of Unknown: nuclear localization signal sequence
MAPKKKRKVGIHGVPAA

SEQ ID NO: 120 - DNA, 51 bp, Unknown
  Description of Unknown: nuclear localization signal sequence
atggccccaaagaagaagcggaaggtcggtatccacggagtcccagcagcc

SEQ ID NO: 121 - protein, 1554 aa, Artificial Sequence
  Description of Artificial Sequence: Synthetic polypeptide
MDKKYSIGLAIGTNSVGWAVITDEYKVPSKKFKVLGNTDRHSIKKNLIGALLFDSGETAEATRLKRTARRRYTRRKNRICYLQEIFSNEMAKVDDSFFHRLEESFLVEEDKKHERHPIFGNIVDEVAYHEKYPTIYHLRKKLVDSTDKADLRLIYLALAHMIKFRGHFLIEGDLNPDNSDVDKLFIQLVQTYNQLFEENPINASGVDAKAILSARLSKSRRLENLIAQLPGEKKNGLFGNLIALSLGLTPNFKSNFDLAEDAKLQLSKDTYDDDLDNLLAQIGDQYADLFLAAKNLSDAILLSDILRVNTEITKAPLSASMIKRYDEHHQDLTLLKALVRQQLPEKYKEIFFDQSKNGYAGYIDGGASQEEFYKFIKPILEKMDGTEELLVKLNREDLLRKQRTFDNGSIPHQIHLGELHAILRRQEDFYPFLKDNREKIEKILTFRIPYYVGPLARGNSRFAWMTRKSEETITPWNFEEVVDKGASAQSFIERMTNFDKNLPNEKVLPKHSLLYEYFTVYNELTKVKYVTEGMRKPAFLSGEQKKAIVDLLFKTNRKVTVKQLKEDYFKKIECFDSVEISGVEDRFNASLGTYHDLLKIIKDKDFLDNEENEDILEDIVLTLTLFEDREMIEERLKTYAHLFDDKVMKQLKRRRYTGWGRLSRKLINGIRDKQSGKTILDFLKSDGFANRNFMQLIHDDSLTFKEDIQKAQVSGQGDSLHEHIANLAGSPAIKKGILQTVKVVDELVKVMGRHKPENIVIEMARENQTTQKGQKNSRERMKRIEEGIKELGSQILKEHPVENTQLQNEKLYLYYLQNGRDMYVDQELDINRLSDYDVDHIVPQSFLKDDSIDNKVLTRSDKNRGKSDNVPSEEVVKKMKNYWRQLLNAKLITQRKFDNLTKAERGGLSELDKAGFIKRQLVETRQITKHVAQILDSRMNTKYDENDKLIREVKVITLKSKLVSDFRKDFQFYKVREINNYHHAHDAYLNAVVGTALIKKYPKLESEFVYGDYKVGSSGSETPGTSESATPESSGSEVEFSHEYWMRHALTLAKRARDEREVPVGAVLVLNNRVIGEGWNRAIGLHDPTAHAEIMALRQGGLVMQNYRLIDATLYVTFEPCVMCAGAMIHSRIGRVVFGVRNAKTGAAGSLMDVLHYPGMNHRVEITEGILADECAALLCYFFRMPRQVFNAQKKAQSSTDYDVRKMIAKSEQEIGKATAKYFFYSNIMNFFKTEITLANGEIRKRPLIETNGETGEIVWDKGRDFATVRKVLSMPQVNIVKKTEVQTGGFSKESILPKRNSDKLIARKKDWDPKKYGGFDSPTVAYSVLVVAKVEKGKSKKLKSVKELLGITIMERSSFEKNPIDFLEAKGYKEVKKDLIIKLPKYSLFELENGRKRMLASAGELQKGNELALPSKYVNFLYLASHYEKLKGSPEDNEQKQLFVEQHKHYLDEIIEQISEFSKRVILADANLDKVLSAYNKHRDKPIREQAENIIHLFTLTNLGAPAAFKYFDTTIDRKRYTSTKEVLDATLIHQSITGLYETRIDLSQLGGD

SEQ ID NO: 122 - protein, 1554 aa, Artificial Sequence
  Description of Artificial Sequence: Synthetic polypeptide
MDKKYSIGLAIGTNSVGWAVITDEYKVPSKKFKVLGNTDRHSIKKNLIGALLFDSGETAEATRLKRTARRRYTRRKNRICYLQEIFSNEMAKVDDSFFHRLEESFLVEEDKKHERHPIFGNIVDEVAYHEKYPTIYHLRKKLVDSTDKADLRLIYLALAHMIKFRGHFLIEGDLNPDNSDVDKLFIQLVQTYNQLFEENPINASGVDAKAILSARLSKSRRLENLIAQLPGEKKNGLFGNLIALSLGLTPNFKSNFDLAEDAKLQLSKDTYDDDLDNLLAQIGDQYADLFLAAKNLSDAILLSDILRVNTEITKAPLSASMIKRYDEHHQDLTLLKALVRQQLPEKYKEIFFDQSKNGYAGYIDGGASQEEFYKFIKPILEKMDGTEELLVKLNREDLLRKQRTFDNGSIPHQIHLGELHAILRRQEDFYPFLKDNREKIEKILTFRIPYYVGPLARGNSRFAWMTRKSEETITPWNFEEVVDKGASAQSFIERMTNFDKNLPNEKVLPKHSLLYEYFTVYNELTKVKYVTEGMRKPAFLSGEQKKAIVDLLFKTNRKVTVKQLKEDYFKKIECFDSVEISGVEDRFNASLGTYHDLLKIIKDKDFLDNEENEDILEDIVLTLTLFEDREMIEERLKTYAHLFDDKVMKQLKRRRYTGWGRLSRKLINGIRDKQSGKTILDFLKSDGFANRNFMQLIHDDSLTFKEDIQKAQVSGQGDSLHEHIANLAGSPAIKKGILQTVKVVDELVKVMGRHKPENIVIEMARENQTTQKGQKNSRERMKRIEEGIKELGSQILKEHPVENTQLQNEKLYLYYLQNGRDMYVDQELDINRLSDYDVDHIVPQSFLKDDSIDNKVLTRSDKNRGKSDNVPSEEVVKKMKNYWRQLLNAKLITQRKFDNLTKAERGGLSELDKAGFIKRQLVETRQITKHVAQILDSRMNTKYDENDKLIREVKVITLKSKLVSDFRKDFQFYKVREINNYHHAHDAYLNAVVGTALIKKYPKLESEFVYGDYKVYDVRKMIGSSGSETPGTSESATPESSGSEVEFSHEYWMRHALTLAKRARDEREVPVGAVLVLNNRVIGEGWNRAIGLHDPTAHAEIMALRQGGLVMQNYRLIDATLYVTFEPCVMCAGAMIHSRIGRVVFGVRNAKTGAAGSLMDVLHYPGMNHRVEITEGILADECAALLCYFFRMPRQVFNAQKKAQSSTDAKSEQEIGKATAKYFFYSNIMNFFKTEITLANGEIRKRPLIETNGETGEIVWDKGRDFATVRKVLSMPQVNIVKKTEVQTGGFSKESILPKRNSDKLIARKKDWDPKKYGGFDSPTVAYSVLVVAKVEKGKSKKLKSVKELLGITIMERSSFEKNPIDFLEAKGYKEVKKDLIIKLPKYSLFELENGRKRMLASAGELQKGNELALPSKYVNFLYLASHYEKLKGSPEDNEQKQLFVEQHKHYLDEIIEQISEFSKRVILADANLDKVLSAYNKHRDKPIREQAENIIHLFTLTNLGAPAAFKYFDTTIDRKRYTSTKEVLDATLIHQSITGLYETRIDLSQLGGD

SEQ ID NO: 123 - protein, 1554 aa, Artificial Sequence
  Description of Artificial Sequence: Synthetic polypeptide
MDKKYSIGLAIGTNSVGWAVITDEYKVPSKKFKVLGNTDRHSIKKNLIGALLFDSGETAEATRLKRTARRRYTRRKNRICYLQEIFSNEMAKVDDSFFHRLEESFLVEEDKKHERHPIFGNIVDEVAYHEKYPTIYHLRKKLVDSTDKADLRLIYLALAHMIKFRGHFLIEGDLNPDNSDVDKLFIQLVQTYNQLFEENPINASGVDAKAILSARLSKSRRLENLIAQLPGEKKNGLFGNLIALSLGLTPNFKSNFDLAEDAKLQLSKDTYDDDLDNLLAQIGDQYADLFLAAKNLSDAILLSDILRVNTEITKAPLSASMIKRYDEHHQDLTLLKALVRQQLPEKYKEIFFDQSKNGYAGYIDGGASQEEFYKFIKPILEKMDGTEELLVKLNREDLLRKQRTFDNGSIPHQIHLGELHAILRRQEDFYPFLKDNREKIEKILTFRIPYYVGPLARGNSRFAWMTRKSEETITPWNFEEVVDKGASAQSFIERMTNFDKNLPNEKVLPKHSLLYEYFTVYNELTKVKYVTEGMRKPAFLSGEQKKAIVDLLFKTNRKVTVKQLKEDYFKKIECFDSVEISGVEDRFNASLGTYHDLLKIIKDKDFLDNEENEDILEDIVLTLTLFEDREMIEERLKTYAHLFDDKVMKQLKRRRYTGWGRLSRKLINGIRDKQSGKTILDFLKSDGFANRNFMQLIHDDSLTFKEDIQKAQVSGQGDSLHEHIANLAGSPAIKKGILQTVKVVDELVKVMGRHKPENIVIEMARENQTTQKGQKNSRERMKRIEEGIKELGSQILKEHPVENTQLQNEKLYLYYLQNGRDMYVDQELDINRLSDYDVDHIVPQSFLKDDSIDNKVLTRSDKNRGKSDNVPSEEVVKKMKNYWRQLLNAKLITQRKFDNLTKAERGGLSELDKAGFIKRQLVETRQITKHVAQILDSRMNTKYDENDKLIREVKVITLKSKLVSDFRKDFQFYKVREINNYHHAHDAYLNAVVGTALIKKYPKLESEFVYGDYKVYDVRKMIAKSEQEIGSSGSETPGTSESATPESSGSEVEFSHEYWMRHALTLAKRARDEREVPVGAVLVLNNRVIGEGWNRAIGLHDPTAHAEIMALRQGGLVMQNYRLIDATLYVTFEPCVMCAGAMIHSRIGRVVFGVRNAKTGAAGSLMDVLHYPGMNHRVEITEGILADECAALLCYFFRMPRQVFNAQKKAQSSTDGKATAKYFFYSNIMNFFKTEITLANGEIRKRPLIETNGETGEIVWDKGRDFATVRKVLSMPQVNIVKKTEVQTGGFSKESILPKRNSDKLIARKKDWDPKKYGGFDSPTVAYSVLVVAKVEKGKSKKLKSVKELLGITIMERSSFEKNPIDFLEAKGYKEVKKDLIIKLPKYSLFELENGRKRMLASAGELQKGNELALPSKYVNFLYLASHYEKLKGSPEDNEQKQLFVEQHKHYLDEIIEQISEFSKRVILADANLDKVLSAYNKHRDKPIREQAENIIHLFTLTNLGAPAAFKYFDTTIDRKRYTSTKEVLDATLIHQSITGLYETRIDLSQLGGD

SEQ ID NO: 124 - protein, 1554 aa, Artificial Sequence
  Description of Artificial Sequence: Synthetic polypeptide
MDKKYSIGLAIGTNSVGWAVITDEYKVPSKKFKVLGNTDRHSIKKNLIGALLFDSGETAEATRLKRTARRRYTRRKNRICYLQEIFSNEMAKVDDSFFHRLEESFLVEEDKKHERHPIFGNIVDEVAYHEKYPTIYHLRKKLVDSTDKADLRLIYLALAHMIKFRGHFLIEGDLNPDNSDVDKLFIQLVQTYNQLFEENPINASGVDAKAILSARLSKSRRLENLIAQLPGEKKNGLFGNLIALSLGLTPNFKSNFDLAEDAKLQLSKDTYDDDLDNLLAQIGDQYADLFLAAKNLSDAILLSDILRVNTEITKAPLSASMIKRYDEHHQDLTLLKALVRQQLPEKYKEIFFDQSKNGYAGYIDGGASQEEFYKFIKPILEKMDGTEELLVKLNREDLLRKQRTFDNGSIPHQIHLGELHAILRRQEDFYPFLKDNREKIEKILTFRIPYYVGPLARGNSRFAWMTRKSEETITPWNFEEVVDKGASAQSFIERMTNFDKNLPNEKVLPKHSLLYEYFTVYNELTKVKYVTEGMRKPAFLSGEQKKAIVDLLFKTNRKVTVKQLKEDYFKKIECFDSVEISGVEDRFNASLGTYHDLLKIIKDKDFLDNEENEDILEDIVLTLTLFEDREMIEERLKTYAHLFDDKVMKQLKRRRYTGWGRLSRKLINGIRDKQSGKTILDFLKSDGFANRNFMQLIHDDSLTFKEDIQKAQVSGQGDSLHEHIANLAGSPAIKKGILQTVKVVDELVKVMGRHKPENIVIEMARENQTTQKGQKNSRERMKRIEEGIKELGSQILKEHPVENTQLQNEKLYLYYLQNGRDMYVDQELDINRLSDYDVDHIVPQSFLKDDSIDNKVLTRSDKNRGKSDNVPSEEVVKKMKNYWRQLLNAKLITQRKFDNLTKAERGGLSELDKAGFIKRQLVETRQITKHVAQILDSRMNTKYDENDKLIREVKVITLKSKLVSDFRKDFQFYKVREINNYHHAHDAYLNAVVGTALIKKYPKLESEFVYGDYKVYDVRKMIAKSEQEIGKATAKYFFYSGSSGSETPGTSESATPESSGSEVEFSHEYWMRHALTLAKRARDEREVPVGAVLVLNNRVIGEGWNRAIGLHDPTAHAEIMALRQGGLVMQNYRLIDATLYVTFEPCVMCAGAMIHSRIGRVVFGVRNAKTGAAGSLMDVLHYPGMNHRVEITEGILADECAALLCYFFRMPRQVFNAQKKAQSSTDNIMNFFKTEITLANGEIRKRPLIETNGETGEIVWDKGRDFATVRKVLSMPQVNIVKKTEVQTGGFSKESILPKRNSDKLIARKKDWDPKKYGGFDSPTVAYSVLVVAKVEKGKSKKLKSVKELLGITIMERSSFEKNPIDFLEAKGYKEVKKDLIIKLPKYSLFELENGRKRMLASAGELQKGNELALPSKYVNFLYLASHYEKLKGSPEDNEQKQLFVEQHKHYLDEIIEQISEFSKRVILADANLDKVLSAYNKHRDKPIREQAENIIHLFTLTNLGAPAAFKYFDTTIDRKRYTSTKEVLDATLIHQSITGLYETRIDLSQLGGD

SEQ ID NO: 125 - protein, 1554 aa, Artificial Sequence
  Description of Artificial Sequence: Synthetic polypeptide
MDKKYSIGLAIGTNSVGWAVITDEYKVPSKKFKVLGNTDRHSIKKNLIGALLFDSGETAEATRLKRTARRRYTRRKNRICYLQEIFSNEMAKVDDSFFHRLEESFLVEEDKKHERHPIFGNIVDEVAYHEKYPTIYHLRKKLVDSTDKADLRLIYLALAHMIKFRGHFLIEGDLNPDNSDVDKLFIQLVQTYNQLFEENPINASGVDAKAILSARLSKSRRLENLIAQLPGEKKNGLFGNLIALSLGLTPNFKSNFDLAEDAKLQLSKDTYDDDLDNLLAQIGDQYADLFLAAKNLSDAILLSDILRVNTEITKAPLSASMIKRYDEHHQDLTLLKALVRQQLPEKYKEIFFDQSKNGYAGYIDGGASQEEFYKFIKPILEKMDGTEELLVKLNREDLLRKQRTFDNGSIPHQIHLGELHAILRRQEDFYPFLKDNREKIEKILTFRIPYYVGPLARGNSRFAWMTRKSEETITPWNFEEVVDKGASAQSFIERMTNFDKNLPNEKVLPKHSLLYEYFTVYNELTKVKYVTEGMRKPAFLSGEQKKAIVDLLFKTNRKVTVKQLKEDYFKKIECFDSVEISGVEDRFNASLGTYHDLLKIIKDKDFLDNEENEDILEDIVLTLTLFEDREMIEERLKTYAHLFDDKVMKQLKRRRYTGWGRLSRKLINGIRDKQSGKTILDFLKSDGFANRNFMQLIHDDSLTFKEDIQKAQVSGQGDSLHEHIANLAGSPAIKKGILQTVKVVDELVKVMGRHKPENIVIEMARENQTTQKGQKNSRERMKRIEEGIKELGSQILKEHPVENTQLQNEKLYLYYLQNGRDMYVDQELDINRLSDYDVDHIVPQSFLKDDSIDNKVLTRSDKNRGKSDNVPSEEVVKKMKNYWRQLLNAKLITQRKFDNLTKAERGGLSELDKAGFIKRQLVETRQITKHVAQILDSRMNTKYDENDKLIREVKVITLKSKLVSDFRKDFQFYKVREINNYHHAHDAYLNAVVGTALIKKYPKLESEFVYGDYKVYDVRKMIAKSEQEIGKATAKYFFYSNIMNFFKTEITLANGEIRKRPLIETNGEGSSGSETPGTSESATPESSGSEVEFSHEYWMRHALTLAKRARDEREVPVGAVLVLNNRVIGEGWNRAIGLHDPTAHAEIMALRQGGLVMQNYRLIDATLYVTFEPCVMCAGAMIHSRIGRVVFGVRNAKTGAAGSLMDVLHYPGMNHRVEITEGILADECAALLCYFFRMPRQVFNAQKKAQSSTDTGEIVWDKGRDFATVRKVLSMPQVNIVKKTEVQTGGFSKESILPKRNSDKLIARKKDWDPKKYGGFDSPTVAYSVLVVAKVEKGKSKKLKSVKELLGITIMERSSFEKNPIDFLEAKGYKEVKKDLIIKLPKYSLFELENGRKRMLASAGELQKGNELALPSKYVNFLYLASHYEKLKGSPEDNEQKQLFVEQHKHYLDEIIEQISEFSKRVILADANLDKVLSAYNKHRDKPIREQAENIIHLFTLTNLGAPAAFKYFDTTIDRKRYTSTKEVLDATLIHQSITGLYETRIDLSQLGGD

SEQ ID NO: 126 - protein, 1554 aa, Artificial Sequence
  Description of Artificial Sequence: Synthetic polypeptide
MDKKYSIGLAIGTNSVGWAVITDEYKVPSKKFKVLGNTDRHSIKKNLIGALLFDSGETAEATRLKRTARRRYTRRKNRICYLQEIFSNEMAKVDDSFFHRLEESFLVEEDKKHERHPIFGNIVDEVAYHEKYPTIYHLRKKLVDSTDKADLRLIYLALAHMIKFRGHFLIEGDLNPDNSDVDKLFIQLVQTYNQLFEENPINASGVDAKAILSARLSKSRRLENLIAQLPGEKKNGLFGNLIALSLGLTPNFKSNFDLAEDAKLQLSKDTYDDDLDNLLAQIGDQYADLFLAAKNLSDAILLSDILRVNTEITKAPLSASMIKRYDEHHQDLTLLKALVRQQLPEKYKEIFFDQSKNGYAGYIDGGASQEEFYKFIKPILEKMDGTEELLVKLNREDLLRKQRTFDNGSIPHQIHLGELHAILRRQEDFYPFLKDNREKIEKILTFRIPYYVGPLARGNSRFAWMTRKSEETITPWNFEEVVDKGASAQSFIERMTNFDKNLPNEKVLPKHSLLYEYFTVYNELTKVKYVTEGMRKPAFLSGEQKKAIVDLLFKTNRKVTVKQLKEDYFKKIECFDSVEISGVEDRFNASLGTYHDLLKIIKDKDFLDNEENEDILEDIVLTLTLFEDREMIEERLKTYAHLFDDKVMKQLKRRRYTGWGRLSRKLINGIRDKQSGKTILDFLKSDGFANRNFMQLIHDDSLTFKEDIQKAQVSGQGDSLHEHIANLAGSPAIKKGILQTVKVVDELVKVMGRHKPENIVIEMARENQTTQKGQKNSRERMKRIEEGIKELGSQILKEHPVENTQLQNEKLYLYYLQNGRDMYVDQELDINRLSDYDVDHIVPQSFLKDDSIDNKVLTRSDKNRGKSDNVPSEEVVKKMKNYWRQLLNAKLITQRKFDNLTKAERGGLSELDKAGFIKRQLVETRQITKHVAQILDSRMNTKYDENDKLIREVKVITLKSKLVSDFRKDFQFYKVREINNYHHAHDAYLNAVVGTALIKKYPKLESEFVYGDYKVYDVRKMIAKSEQEIGKATAKYFFYSNIMNFFKTEITLANGEIRKRPLIETNGETGEIVWDKGRDFATVRKVLSMPQVNIVKKTEVQTGGFSKESILPKRNSDKLIARKKDWDPKKYGGFDSPTVAYSVLVVAKVEKGKSKKLKSVKELLGITIMERSSFEKNPIDFLEAKGYKEVKKDLIIKLPKYSLFELENGRKRMLASAGELQKGNELALPSKYVNFLYLASHYEKLKGGSSGSETPGTSESATPESSGSEVEFSHEYWMRHALTLAKRARDEREVPVGAVLVLNNRVIGEGWNRAIGLHDPTAHAEIMALRQGGLVMQNYRLIDATLYVTFEPCVMCAGAMIHSRIGRVVFGVRNAKTGAAGSLMDVLHYPGMNHRVEITEGILADECAALLCYFFRMPRQVFNAQKKAQSSTDSPEDNEQKQLFVEQHKHYLDEIIEQISEFSKRVILADANLDKVLSAYNKHRDKPIREQAENIIHLFTLTNLGAPAAFKYFDTTIDRKRYTSTKEVLDATLIHQSITGLYETRIDLSQLGGD

SEQ ID NO: 127 - protein, 1554 aa, Artificial Sequence
  Description of Artificial Sequence: Synthetic polypeptide
MDKKYSIGLAIGTNSVGWAVITDEYKVPSKKFKVLGNTDRHSIKKNLIGALLFDSGETAEATRLKRTARRRYTRRKNRICYLQEIFSNEMAKVDDSFFHRLEESFLVEEDKKHERHPIFGNIVDEVAYHEKYPTIYHLRKKLVDSTDKADLRLIYLALAHMIKFRGHFLIEGDLNPDNSDVDKLFIQLVQTYNQLFEENPINASGVDAKAILSARLSKSRRLENLIAQLPGEKKNGLFGNLIALSLGLTPNFKSNFDLAEDAKLQLSKDTYDDDLDNLLAQIGDQYADLFLAAKNLSDAILLSDILRVNTEITKAPLSASMIKRYDEHHQDLTLLKALVRQQLPEKYKEIFFDQSKNGYAGYIDGGASQEEFYKFIKPILEKMDGTEELLVKLNREDLLRKQRTFDNGSIPHQIHLGELHAILRRQEDFYPFLKDNREKIEKILTFRIPYYVGPLARGNSRFAWMTRKSEETITPWNFEEVVDKGASAQSFIERMTNFDKNLPNEKVLPKHSLLYEYFTVYNELTKVKYVTEGMRKPAFLSGEQKKAIVDLLFKTNRKVTVKQLKEDYFKKIECFDSVEISGVEDRFNASLGTYHDLLKIIKDKDFLDNEENEDILEDIVLTLTLFEDREMIEERLKTYAHLFDDKVMKQLKRRRYTGWGRLSRKLINGIRDKQSGKTILDFLKSDGFANRNFMQLIHDDSLTFKEDIQKAQVSGQGDSLHEHIANLAGSPAIKKGILQTVKVVDELVKVMGRHKPENIVIEMARENQTTQKGQKNSRERMKRIEEGIKELGSQILKEHPVENTQLQNEKLYLYYLQNGRDMYVDQELDINRLSDYDVDHIVPQSFLKDDSIDNKVLTRSDKNRGKSDNVPSEEVVKKMKNYWRQLLNAKLITQRKFDNLTKAERGGLSELDKAGFIKRQLVETRQITKHVAQILDSRMNTKYDENDKLIREVKVITLKSKLVSDFRKDFQFYKVREINNYHHAHDAYLNAVVGTALIKKYPKLESEFVYGDYKVYDVRKMIAKSEQEIGKATAKYFFYSNIMNFFKTEITLANGSSGSETPGTSESATPESSGSEVEFSHEYWMRHALTLAKRARDEREVPVGAVLVLNNRVIGEGWNRAIGLHDPTAHAEIMALRQGGLVMQNYRLIDATLYVTFEPCVMCAGAMIHSRIGRVVFGVRNAKTGAAGSLMDVLHYPGMNHRVEITEGILADECAALLCYFFRMPRQVFNAQKKAQSSTDGEIRKRPLIETNGETGEIVWDKGRDFATVRKVLSMPQVNIVKKTEVQTGGFSKESILPKRNSDKLIARKKDWDPKKYGGFDSPTVAYSVLVVAKVEKGKSKKLKSVKELLGITIMERSSFEKNPIDFLEAKGYKEVKKDLIIKLPKYSLFELENGRKRMLASAGELQKGNELALPSKYVNFLYLASHYEKLKGSPEDNEQKQLFVEQHKHYLDEIIEQISEFSKRVILADANLDKVLSAYNKHRDKPIREQAENIIHLFTLTNLGAPAAFKYFDTTIDRKRYTSTKEVLDATLIHQSITGLYETRIDLSQLGGD

SEQ ID NO: 128 - protein, 1554 aa, Artificial Sequence
  Description of Artificial Sequence: Synthetic polypeptide
MDKKYSIGLAIGTNSVGWAVITDEYKVPSKKFKVLGNTDRHSIKKNLIGALLFDSGETAEATRLKRTARRRYTRRKNRICYLQEIFSNEMAKVDDSFFHRLEESFLVEEDKKHERHPIFGNIVDEVAYHEKYPTIYHLRKKLVDSTDKADLRLIYLALAHMIKFRGHFLIEGDLNPDNSDVDKLFIQLVQTYNQLFEENPINASGVDAKAILSARLSKSRRLENLIAQLPGEKKNGLFGNLIALSLGLTPNFKSNFDLAEDAKLQLSKDTYDDDLDNLLAQIGDQYADLFLAAKNLSDAILLSDILRVNTEITKAPLSASMIKRYDEHHQDLTLLKALVRQQLPEKYKEIFFDQSKNGYAGYIDGGASQEEFYKFIKPILEKMDGTEELLVKLNREDLLRKQRTFDNGSIPHQIHLGELHAILRRQEDFYPFLKDNREKIEKILTFRIPYYVGPLARGNSRFAWMTRKSEETITPWNFEEVVDKGASAQSFIERMTNFDKNLPNEKVLPKHSLLYEYFTVYNELTKVKYVTEGMRKPAFLSGEQKKAIVDLLFKTNRKVTVKQLKEDYFKKIECFDSVEISGVEDRFNASLGTYHDLLKIIKDKDFLDNEENEDILEDIVLTLTLFEDREMIEERLKTYAHLFDDKVMKQLKRRRYTGWGRLSRKLINGIRDKQSGKTILDFLKSDGFANRNFMQLIHDDSLTFKEDIQKAQVSGQGDSLHEHIANLAGSPAIKKGILQTVKVVDELVKVMGRHKPENIVIEMARENQTTQKGQKNSRERMKRIEEGIKELGSQILKEHPVENTQLQNEKLYLYYLQNGRDMYVDQELDINRLSDYDVDHIVPQSFLKDDSIDNKVLTRSDKNRGKSDNVPSEEVVKKMKNYWRQLLNAKLITQRKFDNLTKAERGGLSELDKAGFIKRQLVETRQITKHVAQILDSRMNTKYDENDKLIREVKVITLKSKLVSDFRKDFQFYKVREINNYHHAHDAYLNAVVGTALIKKYPKLESEFVYGDYKVYDVRKMIAKSEGSSGSETPGTSESATPESSGSEVEFSHEYWMRHALTLAKRARDEREVPVGAVLVLNNRVIGEGWNRAIGLHDPTAHAEIMALRQGGLVMQNYRLIDATLYVTFEPCVMCAGAMIHSRIGRVVFGVRNAKTGAAGSLMDVLHYPGMNHRVEITEGILADECAALLCYFFRMPRQVFNAQKKAQSSTDQEIGKATAKYFFYSNIMNFFKTEITLANGEIRKRPLIETNGETGEIVWDKGRDFATVRKVLSMPQVNIVKKTEVQTGGFSKESILPKRNSDKLIARKKDWDPKKYGGFDSPTVAYSVLVVAKVEKGKSKKLKSVKELLGITIMERSSFEKNPIDFLEAKGYKEVKKDLIIKLPKYSLFELENGRKRMLASAGELQKGNELALPSKYVNFLYLASHYEKLKGSPEDNEQKQLFVEQHKHYLDEIIEQISEFSKRVILADANLDKVLSAYNKHRDKPIREQAENIIHLFTLTNLGAPAAFKYFDTTIDRKRYTSTKEVLDATLIHQSITGLYETRIDLSQLGGD

SEQ ID NO: 129 - protein, 1540 aa, Artificial Sequence
  Description of Artificial Sequence: Synthetic polypeptide
MDKKYSIGLAIGTNSVGWAVITDEYKVPSKKFKVLGNTDRHSIKKNLIGALLFDSGETAEATRLKRTARRRYTRRKNRICYLQEIFSNEMAKVDDSFFHRLEESFLVEEDKKHERHPIFGNIVDEVAYHEKYPTIYHLRKKLVDSTDKADLRLIYLALAHMIKFRGHFLIEGDLNPDNSDVDKLFIQLVQTYNQLFEENPINASGVDAKAILSARLSKSRRLENLIAQLPGEKKNGLFGNLIALSLGLTPNFKSNFDLAEDAKLQLSKDTYDDDLDNLLAQIGDQYADLFLAAKNLSDAILLSDILRVNTEITKAPLSASMIKRYDEHHQDLTLLKALVRQQLPEKYKEIFFDQSKNGYAGYIDGGASQEEFYKFIKPILEKMDGTEELLVKLNREDLLRKQRTFDNGSIPHQIHLGELHAILRRQEDFYPFLKDNREKIEKILTFRIPYYVGPLARGNSRFAWMTRKSEETITPWNFEEVVDKGASAQSFIERMTNFDKNLPNEKVLPKHSLLYEYFTVYNELTKVKYVTEGMRKPAFLSGEQKKAIVDLLFKTNRKVTVKQLKEDYFKKIECFDSVEISGVEDRFNASLGTYHDLLKIIKDKDFLDNEENEDILEDIVLTLTLFEDREMIEERLKTYAHLFDDKVMKQLKRRRYTGWGRLSRKLINGIRDKQSGKTILDFLKSDGFANRNFMQLIHDDSLTFKEDIQKAQVSGQGDSLHEHIANLAGSPAIKKGILQTVKVVDELVKVMGRHKPENIVIEMARENQGSSGSETPGTSESATPESSGSEVEFSHEYWMRHALTLAKRARDEREVPVGAVLVLNNRVIGEGWNRAIGLHDPTAHAEIMALRQGGLVMQNYRLIDATLYVTFEPCVMCAGAMIHSRIGRVVFGVRNAKTGAAGSLMDVLHYPGMNHRVEITEGILADECAALLCYFFRMPRTTQKGQKNSRERMKRIEEGIKELGSQILKEHPVENTQLQNEKLYLYYLQNGRDMYVDQELDINRLSDYDVDHIVPQSFLKDDSIDNKVLTRSDKNRGKSDNVPSEEVVKKMKNYWRQLLNAKLITQRKFDNLTKAERGGLSELDKAGFIKRQLVETRQITKHVAQILDSRMNTKYDENDKLIREVKVITLKSKLVSDFRKDFQFYKVREINNYHHAHDAYLNAVVGTALIKKYPKLESEFVYGDYKVYDVRKMIAKSEQEIGKATAKYFFYSNIMNFFKTEITLANGEIRKRPLIETNGETGEIVWDKGRDFATVRKVLSMPQVNIVKKTEVQTGGFSKESILPKRNSDKLIARKKDWDPKKYGGFDSPTVAYSVLVVAKVEKGKSKKLKSVKELLGITIMERSSFEKNPIDFLEAKGYKEVKKDLIIKLPKYSLFELENGRKRMLASAGELQKGNELALPSKYVNFLYLASHYEKLKGSPEDNEQKQLFVEQHKHYLDEIIEQISEFSKRVILADANLDKVLSAYNKHRDKPIREQAENIIHLFTLTNLGAPAAFKYFDTTIDRKRYTSTKEVLDATLIHQSITGLYETRIDLSQLGGD

SEQ ID NO: 130 - protein, 1540 aa, Artificial Sequence
  Description of Artificial Sequence: Synthetic polypeptide
MDKKYSIGLAIGTNSVGWAVITDEYKVPSKKFKVLGNTDRHSIKKNLIGALLFDSGETAEATRLKRTARRRYTRRKNRICYLQEIFSNEMAKVDDSFFHRLEESFLVEEDKKHERHPIFGNIVDEVAYHEKYPTIYHLRKKLVDSTDKADLRLIYLALAHMIKFRGHFLIEGDLNPDNSDVDKLFIQLVQTYNQLFEENPINASGVDAKAILSARLSKSRRLENLIAQLPGEKKNGLFGNLIALSLGLTPNFKSNFDLAEDAKLQLSKDTYDDDLDNLLAQIGDQYADLFLAAKNLSDAILLSDILRVNTEITKAPLSASMIKRYDEHHQDLTLLKALVRQQLPEKYKEIFFDQSKNGYAGYIDGGASQEEFYKFIKPILEKMDGTEELLVKLNREDLLRKQRTFDNGSIPHQIHLGELHAILRRQEDFYPFLKDNREKIEKILTFRIPYYVGPLARGNSRFAWMTRKSEETITPWNFEEVVDKGASAQSFIERMTNFDKNLPNEKVLPKHSLLYEYFTVYNELTKVKYVTEGMRKPAFLSGEQKKAIVDLLFKTNRKVTVKQLKEDYFKKIECFDSVEISGVEDRFNASLGTYHDLLKIIKDKDFLDNEENEDILEDIVLTLTLFEDREMIEERLKTYAHLFDDKVMKQLKRRRYTGWGRLSRKLINGIRDKQSGKTILDFLKSDGFANRNFMQLIHDDSLTFKEDIQKAQVSGQGDSLHEHIANLAGSPAIKKGILQTVKVVDELVKVMGRHKPENIVIEMARENQTTQKGQKNSRERMKRIEEGIKELGSQILKEHPVENTQLQNEKLYLYYLQNGRDMYVDQELDINRLSDYDVDHIVPQSFLKDDSIDNKVLTRSDKNRGKSDNVPSEEVVKKMKNYWRQLLNAKLITQRKFDNLTKAERGGLSELDKAGFIKRQLVETRQITKHVAQILDSRMNTKYDENDKLIREVKVITLKSKLVSDFRKDFQFYKVREINNYHHAHDAYLNAVVGTALIKKYPKLESEFVYGDYKVYDVRKMIAKSEQEIGKATAKYFFYSNIMNFFKTEITLANGEIRKRPLIETNGETGEIVWDKGRDFATVRKVLSMPQVNIVKKTEVQTGGFSKESILPKRNSDKLIARKKDWDPKKYGGFDSPTVAYSVLVVAKVEKGKSKKLKSVKELLGITIMERSSFEKNPIDFLEAKGYKEVKKDLIIKLPKYSLFELENGRKRMLASAGELQKGNELALPSKYVNFLYLASHYEKLKGSPGSSGSETPGTSESATPESSGSEVEFSHEYWMRHALTLAKRARDEREVPVGAVLVLNNRVIGEGWNRAIGLHDPTAHAEIMALRQGGLVMQNYRLIDATLYVTFEPCVMCAGAMIHSRIGRVVFGVRNAKTGAAGSLMDVLHYPGMNHRVEITEGILADECAALLCYFFRMPREDNEQKQLFVEQHKHYLDEIIEQISEFSKRVILADANLDKVLSAYNKHRDKPIREQAENIIHLFTLTNLGAPAAFKYFDTTIDRKRYTSTKEVLDATLIHQSITGLYETRIDLSQLGGD

SEQ ID NO: 131 - protein, 1543 aa, Artificial Sequence
  Description of Artificial Sequence: Synthetic polypeptide
MDKKYSIGLAIGTNSVGWAVITDEYKVPSKKFKVLGNTDRHSIKKNLIGALLFDSGETAEATRLKRTARRRYTRRKNRICYLQEIFSNEMAKVDDSFFHRLEESFLVEEDKKHERHPIFGNIVDEVAYHEKYPTIYHLRKKLVDSTDKADLRLIYLALAHMIKFRGHFLIEGDLNPDNSDVDKLFIQLVQTYNQLFEENPINASGVDAKAILSARLSKSRRLENLIAQLPGEKKNGLFGNLIALSLGLTPNFKSNFDLAEDAKLQLSKDTYDDDLDNLLAQIGDQYADLFLAAKNLSDAILLSDILRVNTEITKAPLSASMIKRYDEHHQDLTLLKALVRQQLPEKYKEIFFDQSKNGYAGYIDGGASQEEFYKFIKPILEKMDGTEELLVKLNREDLLRKQRTFDNGSIPHQIHLGELHAILRRQEDFYPFLKDNREKIEKILTFRIPYYVGPLARGNSRFAWMTRKSEETITPWNFEEVVDKGASAQSFIERMTNFDKNLPNEKVLPKHSLLYEYFTVYNELTKVKYVTEGMRKPAFLSGEQKKAIVDLLFKTNRKVTVKQLKEDYFKKIECFDSVEISGVEDRFNASLGTYHDLLKIIKDKDFLDNEENEDILEDIVLTLTLFEDREMIEERLKTYAHLFDDKVMKQLKRRRYTGWGRLSRKLINGIRDKQSGKTILDFLKSDGFANRNFMQLIHDDSLTFKEDIQKAQVSGQGDSLHEHIANLAGSPAIKKGILQTVKVVDELVKVMGRHKPENIVIEMARENQTTQKGQKNSRERMKRIEEGIKELGSQILKEHPVENTQLQNEKLYLYYLQNGRDMYVDQELDINRLSDYDVDHIVPQSFLKDDSIDNKVLTRSDKNRGKSDNVPSEEVVKKMKNYWRQLLNAKLITQRKFDNLTKAERGGLSELDKAGFIKRQLVETRQITKHVAQILDSRMNTKYDENDKLIREVKVITLKSKLVSDFRKDFQFYKVREINNYHHAHDAYLNAVVGTALIKKYPKLESEFVYGDYKVYDVRKMIAKSEQEIGKATAKYFFYSNIMNFFKTEITLANGEIRKRPLIETNGETGEIVWDKGRDFATVRKVLSMPQVNIVKKTEVQTGGFSKESILPKRNSDKLIARKKDWDPKKYGGFDSPTVAYSVLVVAKVEKGKSKKLKSVKELLGITIMERSSFEKNPIDFLEAKGYKEVKKDLIIKLPKYSLFELENGRKRMLASAGELQKGNELALPSKYVNFLYLASHYEKLKGSPGSSGSSGSETPGTSESATPESSGSEVEFSHEYWMRHALTLAKRARDEREVPVGAVLVLNNRVIGEGWNRAIGLHDPTAHAEIMALRQGGLVMQNYRLIDATLYVTFEPCVMCAGAMIHSRIGRVVFGVRNAKTGAAGSLMDVLHYPGMNHRVEITEGILADECAALLCYFFRMPREDNEQKQLFVEQHKHYLDEIIEQISEFSKRVILADANLDKVLSAYNKHRDKPIREQAENIIHLFTLTNLGAPAAFKYFDTTIDRKRYTSTKEVLDATLIHQSITGLYETRIDLSQLGGD

SEQ ID NO: 132 - protein, 1546 aa, Artificial Sequence
  Description of Artificial Sequence: Synthetic polypeptide
MDKKYSIGLAIGTNSVGWAVITDEYKVPSKKFKVLGNTDRHSIKKNLIGALLFDSGETAEATRLKRTARRRYTRRKNRICYLQEIFSNEMAKVDDSFFHRLEESFLVEEDKKHERHPIFGNIVDEVAYHEKYPTIYHLRKKLVDSTDKADLRLIYLALAHMIKFRGHFLIEGDLNPDNSDVDKLFIQLVQTYNQLFEENPINASGVDAKAILSARLSKSRRLENLIAQLPGEKKNGLFGNLIALSLGLTPNFKSNFDLAEDAKLQLSKDTYDDDLDNLLAQIGDQYADLFLAAKNLSDAILLSDILRVNTEITKAPLSASMIKRYDEHHQDLTLLKALVRQQLPEKYKEIFFDQSKNGYAGYIDGGASQEEFYKFIKPILEKMDGTEELLVKLNREDLLRKQRTFDNGSIPHQIHLGELHAILRRQEDFYPFLKDNREKIEKILTFRIPYYVGPLARGNSRFAWMTRKSEETITPWNFEEVVDKGASAQSFIERMTNFDKNLPNEKVLPKHSLLYEYFTVYNELTKVKYVTEGMRKPAFLSGEQKKAIVDLLFKTNRKVTVKQLKEDYFKKIECFDSVEISGVEDRFNASLGTYHDLLKIIKDKDFLDNEENEDILEDIVLTLTLFEDREMIEERLKTYAHLFDDKVMKQLKRRRYTGWGRLSRKLINGIRDKQSGKTILDFLKSDGFANRNFMQLIHDDSLTFKEDIQKAQVSGQGDSLHEHIANLAGSPAIKKGILQTVKVVDELVKVMGRHKPENIVIEMARENQTTQKGQKNSRERMKRIEEGIKELGSQILKEHPVENTQLQNEKLYLYYLQNGRDMYVDQELDINRLSDYDVDHIVPQSFLKDDSIDNKVLTRSDKNRGKSDNVPSEEVVKKMKNYWRQLLNAKLITQRKFDNLTKAERGGLSELDKAGFIKRQLVETRQITKHVAQILDSRMNTKYDENDKLIREVKVITLKSKLVSDFRKDFQFYKVREINNYHHAHDAYLNAVVGTALIKKYPKLESEFVYGDYKVYDVRKMIAKSEQEIGKATAKYFFYSNIMNFFKTEITLANGEIRKRPLIETNGETGEIVWDKGRDFATVRKVLSMPQVNIVKKTEVQTGGFSKESILPKRNSDKLIARKKDWDPKKYGGFDSPTVAYSVLVVAKVEKGKSKKLKSVKELLGITIMERSSFEKNPIDFLEAKGYKEVKKDLIIKLPKYSLFELENGRKRMLASAGELQKGNELALPSKYVNFLYLASHYEKLKGSPGSSGSSGSETPGTSESATPESGSSSGSEVEFSHEYWMRHALTLAKRARDEREVPVGAVLVLNNRVIGEGWNRAIGLHDPTAHAEIMALRQGGLVMQNYRLIDATLYVTFEPCVMCAGAMIHSRIGRVVFGVRNAKTGAAGSLMDVLHYPGMNHRVEITEGILADECAALLCYFFRMPREDNEQKQLFVEQHKHYLDEIIEQISEFSKRVILADANLDKVLSAYNKHRDKPIREQAENIIHLFTLTNLGAPAAFKYFDTTIDRKRYTSTKEVLDATLIHQSITGLYETRIDLSQLGGD

SEQ ID NO: 133 - protein, 1546 aa, Artificial Sequence
  Description of Artificial Sequence: Synthetic polypeptide
MDKKYSIGLAIGTNSVGWAVITDEYKVPSKKFKVLGNTDRHSIKKNLIGALLFDSGETAEATRLKRTARRRYTRRKNRICYLQEIFSNEMAKVDDSFFHRLEESFLVEEDKKHERHPIFGNIVDEVAYHEKYPTIYHLRKKLVDSTDKADLRLIYLALAHMIKFRGHFLIEGDLNPDNSDVDKLFIQLVQTYNQLFEENPINASGVDAKAILSARLSKSRRLENLIAQLPGEKKNGLFGNLIALSLGLTPNFKSNFDLAEDAKLQLSKDTYDDDLDNLLAQIGDQYADLFLAAKNLSDAILLSDILRVNTEITKAPLSASMIKRYDEHHQDLTLLKALVRQQLPEKYKEIFFDQSKNGYAGYIDGGASQEEFYKFIKPILEKMDGTEELLVKLNREDLLRKQRTFDNGSIPHQIHLGELHAILRRQEDFYPFLKDNREKIEKILTFRIPYYVGPLARGNSRFAWMTRKSEETITPWNFEEVVDKGASAQSFIERMTNFDKNLPNEKVLPKHSLLYEYFTVYNELTKVKYVTEGMRKPAFLSGEQKKAIVDLLFKTNRKVTVKQLKEDYFKKIECFDSVEISGVEDRFNASLGTYHDLLKIIKDKDFLDNEENEDILEDIVLTLTLFEDREMIEERLKTYAHLFDDKVMKQLKRRRYTGWGRLSRKLINGIRDKQSGKTILDFLKSDGFANRNFMQLIHDDSLTFKEDIQKAQVSGQGDSLHEHIANLAGSPAIKKGILQTVKVVDELVKVMGRHKPENIVIEMARENQTTQKGQKNSRERMKRIEEGIKELGSQILKEHPVENTQLQNEKLYLYYLQNGRDMYVDQELDINRLSDYDVDHIVPQSFLKDDSIDNKVLTRSDKNRGKSDNVPSEEVVKKMKNYWRQLLNAKLITQRKFDNLTKAERGGLSELDKAGFIKRQLVETRQITKHVAQILDSRMNTKYDENDKLIREVKVITLKSKLVSDFRKDFQFYKVREINNYHHAHDAYLNAVVGTALIKKYPKLESEFVYGDYKVYDVRKMIAKSEQEIGKATAKYFFYSNIMNFFKTEITLANGEIRKRPLIETNGETGEIVWDKGRDFATVRKVLSMPQVNIVKKTEVQTGGFSKESILPKRNSDKLIARKKDWDPKKYGGFDSPTVAYSVLVVAKVEKGKSKKLKSVKELLGITIMERSSFEKNPIDFLEAKGYKEVKKDLIIKLPKYSLFELENGRKRMLASAGELQKGNELALPSKYVNFLYLASHYEKLKGSPGSSGSSGSETPGTSESATPESGSSSGSEVEFSHEYWMRHALTLAKRARDEREVPVGAVLVLNNRVIGEGWNRAIGLHDPTAHAEIMALRQGGLVMQNYRLIDATLYVTFEPCVMCAGAMIHSRIGRVVFGVRNAKTGAAGSLMDVLHYPGMNHRVEITEGILADECAALLCYFFRMRREDNEQKQLFVEQHKHYLDEIIEQISEFSKRVILADANLDKVLSAYNKHRDKPIREQAENIIHLFTLTNLGAPAAFKYFDTTIDRKRYTSTKEVLDATLIHQSITGLYETRIDLSQLGGD

SEQ ID NO: 134 - protein, 1546 aa, Artificial Sequence
  Description of Artificial Sequence: Synthetic polypeptide
MDKKYSIGLAIGTNSVGWAVITDEYKVPSKKFKVLGNTDRHSIKKNLIGALLFDSGETAEATRLKRTARRRYTRRKNRICYLQEIFSNEMAKVDDSFFHRLEESFLVEEDKKHERHPIFGNIVDEVAYHEKYPTIYHLRKKLVDSTDKADLRLIYLALAHMIKFRGHFLIEGDLNPDNSDVDKLFIQLVQTYNQLFEENPINASGVDAKAILSARLSKSRRLENLIAQLPGEKKNGLFGNLIALSLGLTPNFKSNFDLAEDAKLQLSKDTYDDDLDNLLAQIGDQYADLFLAAKNLSDAILLSDILRVNTEITKAPLSASMIKRYDEHHQDLTLLKALVRQQLPEKYKEIFFDQSKNGYAGYIDGGASQEEFYKFIKPILEKMDGTEELLVKLNREDLLRKQRTFDNGSIPHQIHLGELHAILRRQEDFYPFLKDNREKIEKILTFRIPYYVGPLARGNSRFAWMTRKSEETITPWNFEEVVDKGASAQSFIERMTNFDKNLPNEKVLPKHSLLYEYFTVYNELTKVKYVTEGMRKPAFLSGEQKKAIVDLLFKTNRKVTVKQLKEDYFKKIECFDSVEISGVEDRFNASLGTYHDLLKIIKDKDFLDNEENEDILEDIVLTLTLFEDREMIEERLKTYAHLFDDKVMKQLKRRRYTGWGRLSRKLINGIRDKQSGKTILDFLKSDGFANRNFMQLIHDDSLTFKEDIQKAQVSGQGDSLHEHIANLAGSPAIKKGILQTVKVVDELVKVMGRHKPENIVIEMARENQTTQKGQKNSRERMKRIEEGIKELGSQILKEHPVENTQLQNEKLYLYYLQNGRDMYVDQELDINRLSDYDVDHIVPQSFLKDDSIDNKVLTRSDKNRGKSDNVPSEEVVKKMKNYWRQLLNAKLITQRKFDNLTKAERGGLSELDKAGFIKRQLVETRQITKHVAQILDSRMNTKYDENDKLIREVKVITLKSKLVSDFRKDFQFYKVREINNYHHAHDAYLNAVVGTALIKKYPKLESEFVYGDYKVYDVRKMIAKSEQEIGKATAKYFFYSNIMNFFKTEITLANGEIRKRPLIETNGETGEIVWDKGRDFATVRKVLSMPQVNIVKKTEVQTGGFSKESILPKRNSDKLIARKKDWDPKKYGGFDSPTVAYSVLVVAKVEKGKSKKLKSVKELLGITIMERSSFEKNPIDFLEAKGYKEVKKDLIIKLPKYSLFELENGRKRMLASAGELQKGNELALPSKYVNFLYLASHYEKLKGSGSSGSSGSETPGTSESATPESGSSSGSEVEFSHEYWMRHALTLAKRARDEREVPVGAVLVLNNRVIGEGWNRAIGLHDPTAHAEIMALRQGGLVMQNYRLIDATLYVTFEPCVMCAGAMIHSRIGRVVFGVRNAKTGAAGSLMDVLHYPGMNHRVEITEGILADECAALLCYFFRMRRPEDNEQKQLFVEQHKHYLDEIIEQISEFSKRVILADANLDKVLSAYNKHRDKPIREQAENIIHLFTLTNLGAPAAFKYFDTTIDRKRYTSTKEVLDATLIHQSITGLYETRIDLSQLGGD

SEQ ID NO: 135 - protein, 1551 aa, Artificial Sequence
  Description of Artificial Sequence: Synthetic polypeptide
MDKKYSIGLAIGTNSVGWAVITDEYKVPSKKFKVLGNTDRHSIKKNLIGALLFDSGETAEATRLKRTARRRYTRRKNRICYLQEIFSNEMAKVDDSFFHRLEESFLVEEDKKHERHPIFGNIVDEVAYHEKYPTIYHLRKKLVDSTDKADLRLIYLALAHMIKFRGHFLIEGDLNPDNSDVDKLFIQLVQTYNQLFEENPINASGVDAKAILSARLSKSRRLENLIAQLPGEKKNGLFGNLIALSLGLTPNFKSNFDLAEDAKLQLSKDTYDDDLDNLLAQIGDQYADLFLAAKNLSDAILLSDILRVNTEITKAPLSASMIKRYDEHHQDLTLLKALVRQQLPEKYKEIFFDQSKNGYAGYIDGGASQEEFYKFIKPILEKMDGTEELLVKLNREDLLRKQRTFDNGSIPHQIHLGELHAILRRQEDFYPFLKDNREKIEKILTFRIPYYVGPLARGNSRFAWMTRKSEETITPWNFEEVVDKGASAQSFIERMTNFDKNLPNEKVLPKHSLLYEYFTVYNELTKVKYVTEGMRKPAFLSGEQKKAIVDLLFKTNRKVTVKQLKEDYFKKIECFDSVEISGVEDRFNASLGTYHDLLKIIKDKDFLDNEENEDILEDIVLTLTLFEDREMIEERLKTYAHLFDDKVMKQLKRRRYTGWGRLSRKLINGIRDKQSGKTILDFLKSDGFANRNFMQLIHDDSLTFKEDIQKAQVSGQGDSLHEHIANLAGSPAIKKGILQTVKVVDELVKVMGRHKPENIVIEMARENQTTQKGQKNSRERMKRIEEGIKELGSQILKEHPVENTQLQNEKLYLYYLQNGRDMYVDQELDINRLSDYDVDHIVPQSFLKDDSIDNKVLTRSDKNRGKSDNVPSEEVVKKMKNYWRQLLNAKLITQRKFDNLTKAERGGLSELDKAGFIKRQLVETRQITKHVAQILDSRMNTKYDENDKLIREVKVITLKSKLVSDFRKDFQFYKVREINNYHHAHDAYLNAVVGTALIKKYPKLESEFVYGDYKVYDVRKMIAKSEQEIGKATAKYFFYSNIMNFFKTEITLANGEIRKRPLIETNGETGEIVWDKGRDFATVRKVLSMPQVNIVKKTEVQTGGFSKESILPKRNSDKLIARKKDWDPKKYGGFDSPTVAYSVLVVAKVEKGKSKKLKSVKELLGITIMERSSFEKNPIDFLEAKGYKEVKKDLIIKLPKYSLFELENGRKRMLASAGELQKGNELALPSKYVNFLYLASHYEKLKGSPGSSGSSGSETPGTSESATPESGSSGSEVEFSHEYWMRHALTLAKRARDEREVPVGAVLVLNNRVIGEGWNRAHAEIMALRQGGLVMQNYRLIDATLYVTFEPCVMCAGAMIHSRIGRVVFGVRNAKTGAAGSLMDVLHYPGMNHRVEITEGILADECAALLCYFFRMPRQVFNAQKKAQSSTDEDNEQKQLFVEQHKHYLDEIIEQISEFSKRVILADANLDKVLSAYNKHRDKPIREQAENIIHLFTLTNLGAPAAFKYFDTTIDRKRYTSTKEVLDATLIHQSITGLYETRIDLSQLGGD

SEQ ID NO: 136 - protein, 1546 aa, Artificial Sequence
  Description of Artificial Sequence: Synthetic polypeptide
MDKKYSIGLAIGTNSVGWAVITDEYKVPSKKFKVLGNTDRHSIKKNLIGALLFDSGETAEATRLKRTARRRYTRRKNRICYLQEIFSNEMAKVDDSFFHRLEESFLVEEDKKHERHPIFGNIVDEVAYHEKYPTIYHLRKKLVDSTDKADLRLIYLALAHMIKFRGHFLIEGDLNPDNSDVDKLFIQLVQTYNQLFEENPINASGVDAKAILSARLSKSRRLENLIAQLPGEKKNGLFGNLIALSLGLTPNFKSNFDLAEDAKLQLSKDTYDDDLDNLLAQIGDQYADLFLAAKNLSDAILLSDILRVNTEITKAPLSASMIKRYDEHHQDLTLLKALVRQQLPEKYKEIFFDQSKNGYAGYIDGGASQEEFYKFIKPILEKMDGTEELLVKLNREDLLRKQRTFDNGSIPHQIHLGELHAILRRQEDFYPFLKDNREKIEKILTFRIPYYVGPLARGNSRFAWMTRKSEETITPWNFEEVVDKGASAQSFIERMTNFDKNLPNEKVLPKHSLLYEYFTVYNELTKVKYVTEGMRKPAFLSGEQKKAIVDLLFKTNRKVTVKQLKEDYFKKIECFDSVEISGVEDRFNASLGTYHDLLKIIKDKDFLDNEENEDILEDIVLTLTLFEDREMIEERLKTYAHLFDDKVMKQLKRRRYTGWGRLSRKLINGIRDKQSGKTILDFLKSDGFANRNFMQLIHDDSLTFKEDIQKAQVSGQGDSLHEHIANLAGSPAIKKGILQTVKVVDELVKVMGRHKPENIVIEMARENQTTQKGQKNSRERMKRIEEGIKELGSQILKEHPVENTQLQNEKLYLYYLQNGRDMYVDQELDINRLSDYDVDHIVPQSFLKDDSIDNKVLTRSDKNRGKSDNVPSEEVVKKMKNYWRQLLNAKLITQRKFDNLTKAERGGLSELDKAGFIKRQLVETRQITKHVAQILDSRMNTKYDENDKLIREVKVITLKSKLVSDFRKDFQFYKVREINNYHHAHDAYLNAVVGTALIKKYPKLESEFVYGDYKVYDVRKMIAKSEQEIGKATAKYFFYSNIMNFFKTEITLANGEIRKRPLIETNGETGEIVWDKGRDFATVRKVLSMPQVNIVKKTEVQTGGFSKESILPKRNSDKLIARKKDWDPKKYGGFDSPTVAYSVLVVAKVEKGKSKKLKSVKELLGITIMERSSFEKNPIDFLEAKGYKEVKKDLIIKLPKYSLFELENGRKRMLASAGELQKGNELALPSKYVNFLYLASHYEKLKGSPEGSSGSSGSETPGTSESATPESGSSSGSEVEFSHEYWMRHALTLAKRARDEREVPVGAVLVLNNRVIGEGWNRAIGLHDPTAHAEIMALRQGGLVMQNYRLIDATLYVTFEPCVMCAGAMIHSRIGRVVFGVRNAKTGAAGSLMDVLHYPGMNHRVEITEGILADECAALLCYFFRMRRDNEQKQLFVEQHKHYLDEIIEQISEFSKRVILADANLDKVLSAYNKHRDKPIREQAENIIHLFTLTNLGAPAAFKYFDTTIDRKRYTSTKEVLDATLIHQSITGLYETRIDLSQLGGD

SEQ ID NO: 137 - protein, 1546 aa, Artificial Sequence
  Description of Artificial Sequence: Synthetic polypeptide
MDKKYSIGLAIGTNSVGWAVITDEYKVPSKKFKVLGNTDRHSIKKNLIGALLFDSGETAEATRLKRTARRRYTRRKNRICYLQEIFSNEMAKVDDSFFHRLEESFLVEEDKKHERHPIFGNIVDEVAYHEKYPTIYHLRKKLVDSTDKADLRLIYLALAHMIKFRGHFLIEGDLNPDNSDVDKLFIQLVQTYNQLFEENPINASGVDAKAILSARLSKSRRLENLIAQLPGEKKNGLFGNLIALSLGLTPNFKSNFDLAEDAKLQLSKDTYDDDLDNLLAQIGDQYADLFLAAKNLSDAILLSDILRVNTEITKAPLSASMIKRYDEHHQDLTLLKALVRQQLPEKYKEIFFDQSKNGYAGYIDGGASQEEFYKFIKPILEKMDGTEELLVKLNREDLLRKQRTFDNGSIPHQIHLGELHAILRRQEDFYPFLKDNREKIEKILTFRIPYYVGPLARGNSRFAWMTRKSEETITPWNFEEVVDKGASAQSFIERMTNFDKNLPNEKVLPKHSLLYEYFTVYNELTKVKYVTEGMRKPAFLSGEQKKAIVDLLFKTNRKVTVKQLKEDYFKKIECFDSVEISGVEDRFNASLGTYHDLLKIIKDKDFLDNEENEDILEDIVLTLTLFEDREMIEERLKTYAHLFDDKVMKQLKRRRYTGWGRLSRKLINGIRDKQSGKTILDFLKSDGFANRNFMQLIHDDSLTFKEDIQKAQVSGQGDSLHEHIANLAGSPAIKKGILQTVKVVDELVKVMGRHKPENIVIEMARENQTTQKGQKNSRERMKRIEEGIKELGSQILKEHPVENTQLQNEKLYLYYLQNGRDMYVDQELDINRLSDYDVDHIVPQSFLKDDSIDNKVLTRSDKNRGKSDNVPSEEVVKKMKNYWRQLLNAKLITQRKFDNLTKAERGGLSELDKAGFIKRQLVETRQITKHVAQILDSRMNTKYDENDKLIREVKVITLKSKLVSDFRKDFQFYKVREINNYHHAHDAYLNAVVGTALIKKYPKLESEFVYGDYKVYDVRKMIAKSEQEIGKATAKYFFYSNIMNFFKTEITLANGEIRKRPLIETNGETGEIVWDKGRDFATVRKVLSMPQVNIVKKTEVQTGGFSKESILPKRNSDKLIARKKDWDPKKYGGFDSPTVAYSVLVVAKVEKGKSKKLKSVKELLGITIMERSSFEKNPIDFLEAKGYKEVKKDLIIKLPKYSLFELENGRKRMLASAGELQKGNELALPSKYVNFLYLASHYEKLKGSPEDGSSGSSGSETPGTSESATPESGSSSGSEVEFSHEYWMRHALTLAKRARDEREVPVGAVLVLNNRVIGEGWNRAIGLHDPTAHAEIMALRQGGLVMQNYRLIDATLYVTFEPCVMCAGAMIHSRIGRVVFGVRNAKTGAAGSLMDVLHYPGMNHRVEITEGILADECAALLCYFFRMRRNEQKQLFVEQHKHYLDEIIEQISEFSKRVILADANLDKVLSAYNKHRDKPIREQAENIIHLFTLTNLGAPAAFKYFDTTIDRKRYTSTKEVLDATLIHQSITGLYETRIDLSQLGGD

SEQ ID NO: 138 - protein, 1533 aa, Artificial Sequence
  Description of Artificial Sequence: Synthetic polypeptide
MDKKYSIGLAIGTNSVGWAVITDEYKVPSKKFKVLGNTDRHSIKKNLIGALLFDSGETAEATRLKRTARRRYTRRKNRICYLQEIFSNEMAKVDDSFFHRLEESFLVEEDKKHERHPIFGNIVDEVAYHEKYPTIYHLRKKLVDSTDKADLRLIYLALAHMIKFRGHFLIEGDLNPDNSDVDKLFIQLVQTYNQLFEENPINASGVDAKAILSARLSKSRRLENLIAQLPGEKKNGLFGNLIALSLGLTPNFKSNFDLAEDAKLQLSKDTYDDDLDNLLAQIGDQYADLFLAAKNLSDAILLSDILRVNTEITKAPLSASMIKRYDEHHQDLTLLKALVRQQLPEKYKEIFFDQSKNGYAGYIDGGASQEEFYKFIKPILEKMDGTEELLVKLNREDLLRKQRTFDNGSIPHQIHLGELHAILRRQEDFYPFLKDNREKIEKILTFRIPYYVGPLARGNSRFAWMTRKSEETITPWNFEEVVDKGASAQSFIERMTNFDKNLPNEKVLPKHSLLYEYFTVYNELTKVKYVTEGMRKPAFLSGEQKKAIVDLLFKTNRKVTVKQLKEDYFKKIECFDSVEISGVEDRFNASLGTYHDLLKIIKDKDFLDNEENEDILEDIVLTLTLFEDREMIEERLKTYAHLFDDKVMKQLKRRRYTGWGRLSRKLINGIRDKQSGKTILDFLKSDGFANRNFMQLIHDDSLTFKEDIQKAQVSGQGDSLHEHIANLAGSPAIKKGILQTVKVVDELVKVMGRHKPENIVIEMARENQTTQKGQKNSRERMKRIEEGIKELGSQILKEHPVENTQLQNEKLYLYYLQNGRDMYVDQELDINRLSDYDVDHIVPQSFLKDDSIDNKVLTRSDKNRGKSDNVPSEEVVKKMKNYWRQLLNAKLITQRKFDNLTKAERGGLSELDKAGFIKRQLVETRQITKHVAQILDSRMNTKYDENDKLIREVKVITLKSKLVSDFRKDFQFYKVREINNYHHAHDAYLNAVVGTALIKKYPKLESEFVYGDYKVYDVRKMIAKSEQEIGKATAKYFFYSNIMNFFKTEITLANGEIRKRPLIETNGETGEIVWDKGRDFATVRKVLSMPQVNIVKKTEVQTGGFSKESILPKRNSDKLIARKKDWDPKKYGGFDSPTVAYSVLVVAKVEKGKSKKLKSVKELLGITIMERSSFEKNPIDFLEAKGYKEVKKDLIIKLPKYSLFELENGRKRMLASAGELQKGNELALPSKYVNFLYLASHYEKLKGSPGSSGSETPGTSESATPESSGSEVEFSHEYWMRHALTLAKRARDEREVPVGAVLVLNNRVIGEGWNRAHAEIMALRQGGLVMQNYRLIDATLYVTFEPCVMCAGAMIHSRIGRVVFGVRNAKTGAAGSLMDVLHYPGMNHRVEITEGILADECAALLCYFFRMPRQEDNEQKQLFVEQHKHYLDEIIEQISEFSKRVILADANLDKVLSAYNKHRDKPIREQAENIIHLFTLTNLGAPAAFKYFDTTIDRKRYTSTKEVLDATLIHQSITGLYETRIDLSQLGGD

SEQ ID NO: 139 - protein, 1549 aa, Artificial Sequence
  Description of Artificial Sequence: Synthetic polypeptide
MDKKYSIGLAIGTNSVGWAVITDEYKVPSKKFKVLGNTDRHSIKKNLIGALLFDSGETAEATRLKRTARRRYTRRKNRICYLQEIFSNEMAKVDDSFFHRLEESFLVEEDKKHERHPIFGNIVDEVAYHEKYPTIYHLRKKLVDSTDKADLRLIYLALAHMIKFRGHFLIEGDLNPDNSDVDKLFIQLVQTYNQLFEENPINASGVDAKAILSARLSKSRRLENLIAQLPGEKKNGLFGNLIALSLGLTPNFKSNFDLAEDAKLQLSKDTYDDDLDNLLAQIGDQYADLFLAAKNLSDAILLSDILRVNTEITKAPLSASMIKRYDEHHQDLTLLKALVRQQLPEKYKEIFFDQSKNGYAGYIDGGASQEEFYKFIKPILEKMDGTEELLVKLNREDLLRKQRTFDNGSIPHQIHLGELHAILRRQEDFYPFLKDNREKIEKILTFRIPYYVGPLARGNSRFAWMTRKSEETITPWNFEEVVDKGASAQSFIERMTNFDKNLPNEKVLPKHSLLYEYFTVYNELTKVKYVTEGMRKPAFLSGEQKKAIVDLLFKTNRKVTVKQLKEDYFKKIECFDSVEISGVEDRFNASLGTYHDLLKIIKDKDFLDNEENEDILEDIVLTLTLFEDREMIEERLKTYAHLFDDKVMKQLKRRRYTGWGRLSRKLINGIRDKQSGKTILDFLKSDGFANRNFMQLIHDDSLTFKEDIQKAQVSGQGDSLHEHIANLAGSPAIKKGILQTVKVVDELVKVMGRHKPENIVIEMARENQTTQKGQKNSRERMKRIEEGIKELGSQILKEHPVENTQLQNEKLYLYYLQNGRDMYVDQELDINRLSDYDVDHIVPQSFLKDDSIDNKVLTRSDKNRGKSDNVPSEEVVKKMKNYWRQLLNAKLITQRKFDNLTKAERGGLSELDKAGFIKRQLVETRQITKHVAQILDSRMNTKYDENDKLIREVKVITLKSKLVSDFRKDFQFYKVREINNYHHAHDAYLNAVVGTALSHEYWMRHALTLAKRARDEREVPVGAVLVLNNRVIGEGWNRAIGLHDPTAHAEIMALRQGGLVMQNYRLIDATLYVTFEPCVMCAGAMIHSRIGRVVFGVRNAKTGAAGSLMDVLHYPGMNHRVEITEGILADECAALLCYFFRMPRQVFNAQKKAQSSTDGSSGSETPGTSESATPESSGIKKYPKLESEFVYGDYKVYDVRKMIAKSEQEIGKATAKYFFYSNIMNFFKTEITLANGEIRKRPLIETNGETGEIVWDKGRDFATVRKVLSMPQVNIVKKTEVQTGGFSKESILPKRNSDKLIARKKDWDPKKYGGFDSPTVAYSVLVVAKVEKGKSKKLKSVKELLGITIMERSSFEKNPIDFLEAKGYKEVKKDLIIKLPKYSLFELENGRKRMLASAGELQKGNELALPSKYVNFLYLASHYEKLKGSPEDNEQKQLFVEQHKHYLDEIIEQISEFSKRVILADANLDKVLSAYNKHRDKPIREQAENIIHLFTLTNLGAPAAFKYFDTTIDRKRYTSTKEVLDATLIHQSITGLYETRIDLSQLGGD

SEQ ID NO: 140 - protein, 1555 aa, Artificial Sequence
  Description of Artificial Sequence: Synthetic polypeptide
MDKKYSIGLAIGTNSVGWAVITDEYKVPSKKFKVLGNTDRHSIKKNLIGALLFDSGETAEATRLKRTARRRYTRRKNRICYLQEIFSNEMAKVDDSFFHRLEESFLVEEDKKHERHPIFGNIVDEVAYHEKYPTIYHLRKKLVDSTDKADLRLIYLALAHMIKFRGHFLIEGDLNPDNSDVDKLFIQLVQTYNQLFEENPINASGVDAKAILSARLSKSRRLENLIAQLPGEKKNGLFGNLIALSLGLTPNFKSNFDLAEDAKLQLSKDTYDDDLDNLLAQIGDQYADLFLAAKNLSDAILLSDILRVNTEITKAPLSASMIKRYDEHHQDLTLLKALVRQQLPEKYKEIFFDQSKNGYAGYIDGGASQEEFYKFIKPILEKMDGTEELLVKLNREDLLRKQRTFDNGSIPHQIHLGELHAILRRQEDFYPFLKDNREKIEKILTFRIPYYVGPLARGNSRFAWMTRKSEETITPWNFEEVVDKGASAQSFIERMTNFDKNLPNEKVLPKHSLLYEYFTVYNELTKVKYVTEGMRKPAFLSGEQKKAIVDLLFKTNRKVTVKQLKEDYFKKIECFDSVEISGVEDRFNASLGTYHDLLKIIKDKDFLDNEENEDILEDIVLTLTLFEDREMIEERLKTYAHLFDDKVMKQLKRRRYTGWGRLSRKLINGIRDKQSGKTILDFLKSDGFANRNFMQLIHDDSLTFKEDIQKAQVSGQGDSLHEHIANLAGSPAIKKGILQTVKVVDELVKVMGRHKPENIVIEMARENQTTQKGQKNSRERMKRIEEGIKELGSQILKEHPVENTQLQNEKLYLYYLQNGRDMYVDQELDINRLSDYDVDHIVPQSFLKDDSIDNKVLTRSDKNRGKSDNVPSEEVVKKMKNYWRQLLNAKLITQRKFDNLTKAERGGLSELDKAGFIKRQLVETRQITKHVAQILDSRMNTKYDENDKLIREVKVITLKSKLVSDFRKDFQFYKVREINNYHHAHDAYLNAVVGTALSHEYWMRHALTLAKRARDEREVPVGAVLVLNNRVIGEGWNRAIGLHDPTAHAEIMALRQGGLVMQNYRLIDATLYVTFEPCVMCAGAMIHSRIGRVVFGVRNAKTGAAGSLMDVLHYPGMNHRVEITEGILADECAALLCYFFRMPRQVFNAQKKAQSSTDGSSGSSGSETPGTSESATPESSGGSSIKKYPKLESEFVYGDYKVYDVRKMIAKSEQEIGKATAKYFFYSNIMNFFKTEITLANGEIRKRPLIETNGETGEIVWDKGRDFATVRKVLSMPQVNIVKKTEVQTGGFSKESILPKRNSDKLIARKKDWDPKKYGGFDSPTVAYSVLVVAKVEKGKSKKLKSVKELLGITIMERSSFEKNPIDFLEAKGYKEVKKDLIIKLPKYSLFELENGRKRMLASAGELQKGNELALPSKYVNFLYLASHYEKLKGSPEDNEQKQLFVEQHKHYLDEIIEQISEFSKRVILADANLDKVLSAYNKHRDKPIREQAENIIHLFTLTNLGAPAAFKYFDTTIDRKRYTSTKEVLDATLIHQSITGLYETRIDLSQLGGD

SEQ ID NO: 141 - protein, 1421 aa, Artificial Sequence
  Description of Artificial Sequence: Synthetic polypeptide
MDKKYSIGLAIGTNSVGWAVITDEYKVPSKKFKVLGNTDRHSIKKNLIGALLFDSGETAEATRLKRTARRRYTRRKNRICYLQEIFSNEMAKVDDSFFHRLEESFLVEEDKKHERHPIFGNIVDEVAYHEKYPTIYHLRKKLVDSTDKADLRLIYLALAHMIKFRGHFLIEGDLNPDNSDVDKLFIQLVQTYNQLFEENPINASGVDAKAILSARLSKSRRLENLIAQLPGEKKNGLFGNLIALSLGLTPNFKSNFDLAEDAKLQLSKDTYDDDLDNLLAQIGDQYADLFLAAKNLSDAILLSDILRVNTEITKAPLSASMIKRYDEHHQDLTLLKALVRQQLPEKYKEIFFDQSKNGYAGYIDGGASQEEFYKFIKPILEKMDGTEELLVKLNREDLLRKQRTFDNGSIPHQIHLGELHAILRRQEDFYPFLKDNREKIEKILTFRIPYYVGPLARGNSRFAWMTRKSEETITPWNFEEVVDKGASAQSFIERMTNFDKNLPNEKVLPKHSLLYEYFTVYNELTKVKYVTEGMRKPAFLSGEQKKAIVDLLFKTNRKVTVKQLKEDYFKKIECFDSVEISGVEDRFNASLGTYHDLLKIIKDKDFLDNEENEDILEDIVLTLTLFEDREMIEERLKTYAHLFDDKVMKQLKRRRYTGWGRLSRKLINGIRDKQSGKTILDFLKSDGFANRNFMQLIHDDSLTFKEDIQKAQVSGQGDSLHEHIANLAGSPAIKKGILQTVKVVDELVKVMGRHKPENIVIEMARENQTTQKGQKNSRERMKRIEEGIKELGSEVEFSHEYWMRHALTLAKRARDEREVPVGAVLVLNNRVIGEGWNRAIGLHDPTAHAEIMALRQGGLVMQNYRLIDATLYVTFEPCVMCAGAMIHSRIGRVVFGVRNAKTGAAGSLMDVLHYPGMNHRVEITEGILADECAALLCYFFRMPRQVFNAQKKAQSSTDGGLSELDKAGFIKRQLVETRQITKHVAQILDSRMNTKYDENDKLIREVKVITLKSKLVSDFRKDFQFYKVREINNYHHAHDAYLNAVVGTALIKKYPKLESEFVYGDYKVYDVRKMIAKSEQEIGKATAKYFFYSNIMNFFKTEITLANGEIRKRPLIETNGETGEIVWDKGRDFATVRKVLSMPQVNIVKKTEVQTGGFSKESILPKRNSDKLIARKKDWDPKKYGGFDSPTVAYSVLVVAKVEKGKSKKLKSVKELLGITIMERSSFEKNPIDFLEAKGYKEVKKDLIIKLPKYSLFELENGRKRMLASAGELQKGNELALPSKYVNFLYLASHYEKLKGSPEDNEQKQLFVEQHKHYLDEIIEQISEFSKRVILADANLDKVLSAYNKHRDKPIREQAENIIHLFTLTNLGAPAAFKYFDTTIDRKRYTSTKEVLDATLIHQSITGLYETRIDLSQLGGD

SEQ ID NO: 142 - protein, 1552 aa, Artificial Sequence
  Description of Artificial Sequence: Synthetic polypeptide
MSEVEFSHEYWMRHALTLAKRARDEREVPVGAVLVLNNRVIGEGWNRAIGLHDPTAHAEIMALRQGGLVMQNYRLIDATLYVTFEPCVMCAGAMIHSRIGRVVFGVRNAKTGAAGSLMDVLHYPGMNHRVEITEGILADECAALLCYFFRMPRSGGSSGGSSGSETPGTSESATPESSGGSSGGSDKKYSIGLAIGTNSVGWAVITDEYKVPSKKFKVLGNTDRHSIKKNLIGALLFDSGETAEATRLKRTARRRYTRRKNRICYLQEIFSNEMAKVDDSFFHRLEESFLVEEDKKHERHPIFGNIVDEVAYHEKYPTIYHLRKKLVDSTDKADLRLIYLALAHMIKFRGHFLIEGDLNPDNSDVDKLFIQLVQTYNQLFEENPINASGVDAKAILSARLSKSRRLENLIAQLPGEKKNGLFGNLIALSLGLTPNFKSNFDLAEDAKLQLSKDTYDDDLDNLLAQIGDQYADLFLAAKNLSDAILLSDILRVNTEITKAPLSASMIKRYDEHHQDLTLLKALVRQQLPEKYKEIFFDQSKNGYAGYIDGGASQEEFYKFIKPILEKMDGTEELLVKLNREDLLRKQRTFDNGSIPHQIHLGELHAILRRQEDFYPFLKDNREKIEKILTFRIPYYVGPLARGNSRFAWMTRKSEETITPWNFEEVVDKGASAQSFIERMTNFDKNLPNEKVLPKHSLLYEYFTVYNELTKVKYVTEGMRKPAFLSGEQKKAIVDLLFKTNRKVTVKQLKEDYFKKIECFDSVEISGVEDRFNASLGTYHDLLKIIKDKDFLDNEENEDILEDIVLTLTLFEDREMIEERLKTYAHLFDDKVMKQLKRRRYTGWGRLSRKLINGIRDKQSGKTILDFLKSDGFANRNFMQLIHDDSLTFKEDIQKAQVSGQGDSLHEHIANLAGSPAIKKGILQTVKVVDELVKVMGRHKPENIVIEMARENQTTQKGQKNSRERMKRIEEGIKELGSQILKEHPVENTQLQNEKLYLYYLQNGRDMYVDQELDINRLSDYDVDHIVPQSFLKDDSIDNKVLTRSDKNRGKSDNVPSEEVVKKMKNYWRQLLNAKLITQRKFDNLTKAERGGLSELDKAGFIKRQLVETRQITKHVAQILDSRMNTKYDENDKLIREVKVITLKSKLVSDFRKDFQFYKVREINNYHHAHDAYLNAVVGTALIKKYPKLESEFVYGDYKVYDVRKMIAKSEQEIGKATAKYFFYSNIMNFFKTEITLANGEIRKRPLIETNGETGEIVWDKGRDFATVRKVLSMPQVNIVKKTEVQTGGFSKESILPKRNSDKLIARKKDWDPKKYGGFDSPTVAYSVLVVAKVEKGKSKKLKSVKELLGITIMERSSFEKNPIDFLEAKGYKEVKKDLIIKLPKYSLFELENGRKRMLASAGELQKGNELALPSKYVNFLYLASHYEKLKGSPEDNEQKQLFVEQHKHYLDEIIEQISEFSKRVILADANLDKVLSAYNKHRDKPIREQAENIIHLFTLTNLGAPAAFKYFDTTIDRKRYTSTKEVLDATLIHQSITGLYETRIDLSQLGGD

SEQ ID NO: 143 - protein, 1545 aa, Artificial Sequence
  Description of Artificial Sequence: Synthetic polypeptide
MSEVEFSHEYWMRHALTLAKRARDEREVPVGAVLVLNNRVIGEGWNRTAHAEIMALRQGGLVMQNYRLIDATLYVTFEPCVMCAGAMIHSRIGRVVFGVRNAKTGAAGSLMDVLHYPGMNHRVEITEGILADECAALLCYFFRMPRSGGSSGGSSGSETPGTSESATPESSGGSSGGSDKKYSIGLAIGTNSVGWAVITDEYKVPSKKFKVLGNTDRHSIKKNLIGALLFDSGETAEATRLKRTARRRYTRRKNRICYLQEIFSNEMAKVDDSFFHRLEESFLVEEDKKHERHPIFGNIVDEVAYHEKYPTIYHLRKKLVDSTDKADLRLIYLALAHMIKFRGHFLIEGDLNPDNSDVDKLFIQLVQTYNQLFEENPINASGVDAKAILSARLSKSRRLENLIAQLPGEKKNGLFGNLIALSLGLTPNFKSNFDLAEDAKLQLSKDTYDDDLDNLLAQIGDQYADLFLAAKNLSDAILLSDILRVNTEITKAPLSASMIKRYDEHHQDLTLLKALVRQQLPEKYKEIFFDQSKNGYAGYIDGGASQEEFYKFIKPILEKMDGTEELLVKLNREDLLRKQRTFDNGSIPHQIHLGELHAILRRQEDFYPFLKDNREKIEKILTFRIPYYVGPLARGNSRFAWMTRKSEETITPWNFEEVVDKGASAQSFIERMTNFDKNLPNEKVLPKHSLLYEYFTVYNELTKVKYVTEGMRKPAFLSGEQKKAIVDLLFKTNRKVTVKQLKEDYFKKIECFDSVEISGVEDRFNASLGTYHDLLKIIKDKDFLDNEENEDILEDIVLTLTLFEDREMIEERLKTYAHLFDDKVMKQLKRRRYTGWGRLSRKLINGIRDKQSGKTILDFLKSDGFANRNFMQLIHDDSLTFKEDIQKAQVSGQGDSLHEHIANLAGSPAIKKGILQTVKVVDELVKVMGRHKPENIVIEMARENQTTQKGQKNSRERMKRIEEGIKELGSQILKEHPVENTQLQNEKLYLYYLQNGRDMYVDQELDINRLSDYDVDHIVPQSFLKDDSIDNKVLTRSDKNRGKSDNVPSEEVVKKMKNYWRQLLNAKLITQRKFDNLTKAERGGLSELDKAGFIKRQLVETRQITKHVAQILDSRMNTKYDENDKLIREVKVITLKSKLVSDFRKDFQFYKVREINNYHHAHDAYLNAVVGTALIKKYPKLESEFVYGDYKVYDVRKMIAKSEQEIGKATAKYFFYSNIMNFFKTEITLANGEIRKRPLIETNGETGEIVWDKGRDFATVRKVLSMPQVNIVKKTEVQTGGFSKESILPKRNSDKLIARKKDWDPKKYGGFDSPTVAYSVLVVAKVEKGKSKKLKSVKELLGITIMERSSFEKNPIDFLEAKGYKEVKKDLIIKLPKYSLFELENGRKRMLASAGELQKGNELALPSKYVNFLYLASHYEKLKGSPEDNEQKQLFVEQHKHYLDEIIEQISEFSKRVILADANLDKVLSAYNKHRDKPIREQAENIIHLFTLTNLGAPAAFKYFDTTIDRKRYTSTKEVLDATLIHQSITGLYETRIDLSQLGGD

SEQ ID NO: 144 - protein, 1541 aa, Artificial Sequence
  Description of Artificial Sequence: Synthetic polypeptide
MDKKYSIGLAIGTNSVGWAVITDEYKVPSKKFKVLGNTDRHSIKKNLIGALLFDSGETAEATRLKRTARRRYTRRKNRICYLQEIFSNEMAKVDDSFFHRLEESFLVEEDKKHERHPIFGNIVDEVAYHEKYPTIYHLRKKLVDSTDKADLRLIYLALAHMIKFRGHFLIEGDLNPDNSDVDKLFIQLVQTYNQLFEENPINASGVDAKAILSARLSKSRRLENLIAQLPGEKKNGLFGNLIALSLGLTPNFKSNFDLAEDAKLQLSKDTYDDDLDNLLAQIGDQYADLFLAAKNLSDAILLSDILRVNTEITKAPLSASMIKRYDEHHQDLTLLKALVRQQLPEKYKEIFFDQSKNGYAGYIDGGASQEEFYKFIKPILEKMDGTEELLVKLNREDLLRKQRTFDNGSIPHQIHLGELHAILRRQEDFYPFLKDNREKIEKILTFRIPYYVGPLARGNSRFAWMTRKSEETITPWNFEEVVDKGASAQSFIERMTNFDKNLPNEKVLPKHSLLYEYFTVYNELTKVKYVTEGMRKPAFLSGEQKKAIVDLLFKTNRKVTVKQLKEDYFKKIECFDSVEISGVEDRFNASLGTYHDLLKIIKDKDFLDNEENEDILEDIVLTLTLFEDREMIEERLKTYAHLFDDKVMKQLKRRRYTGWGRLSRKLINGIRDKQSGKTILDFLKSDGFANRNFMQLIHDDSLTFKEDIQKAQVSGQGDSLHEHIANLAGSPAIKKGILQTVKVVDELVKVMGRHKPENIVIEMARENQTTQKGQKNSRERMKRIEEGIKELGSQILKEHPVENTQLQNEKLYLYYLQNGRDMYVDQELDINRLSDYDVDHIVPQSFLKDDSIDNKVLTRSDKNRGKSDNVPSEEVVKKMKNYWRQLLNAKLITQRKFDNLTKAERGGLSELDKAGFIKRQLVETRQITKHVAQILDSRMNTKYDENDKLIREVKVITLKSKLVSDFRKDFQFYKVREINNYHHAHDAYLNAVVGTALIKKYPKGSSGSETPGTSESATPESSGSEVEFSHEYWMRHALTLAKRARDEREVPVGAVLVLNNRVIGEGWNRAIGLHDPTAHAEIMALRQGGLVMQNYRLIDATLYVTFEPCVMCAGAMIHSRIGRVVFGVRNAKTGAAGSLMDVLHYPGMNHRVEITEGILADECAALLCYFFRMPRQLESEFVYGDYKVYDVRKMIAKSEQEIGKATAKYFFYSNIMNFFKTEITLANGEIRKRPLIETNGETGEIVWDKGRDFATVRKVLSMPQVNIVKKTEVQTGGFSKESILPKRNSDKLIARKKDWDPKKYGGFDSPTVAYSVLVVAKVEKGKSKKLKSVKELLGITIMERSSFEKNPIDFLEAKGYKEVKKDLIIKLPKYSLFELENGRKRMLASAGELQKGNELALPSKYVNFLYLASHYEKLKGSPEDNEQKQLFVEQHKHYLDEIIEQISEFSKRVILADANLDKVLSAYNKHRDKPIREQAENIIHLFTLTNLGAPAAFKYFDTTIDRKRYTSTKEVLDATLIHQSITGLYETRIDLSQLGGD

SEQ ID NO: 145 - protein, 1541 aa, Artificial Sequence
  Description of Artificial Sequence: Synthetic polypeptide
MDKKYSIGLAIGTNSVGWAVITDEYKVPSKKFKVLGNTDRHSIKKNLIGALLFDSGETAEATRLKRTARRRYTRRKNRICYLQEIFSNEMAKVDDSFFHRLEESFLVEEDKKHERHPIFGNIVDEVAYHEKYPTIYHLRKKLVDSTDKADLRLIYLALAHMIKFRGHFLIEGDLNPDNSDVDKLFIQLVQTYNQLFEENPINASGVDAKAILSARLSKSRRLENLIAQLPGEKKNGLFGNLIALSLGLTPNFKSNFDLAEDAKLQLSKDTYDDDLDNLLAQIGDQYADLFLAAKNLSDAILLSDILRVNTEITKAPLSASMIKRYDEHHQDLTLLKALVRQQLPEKYKEIFFDQSKNGYAGYIDGGASQEEFYKFIKPILEKMDGTEELLVKLNREDLLRKQRTFDNGSIPHQIHLGELHAILRRQEDFYPFLKDNREKIEKILTFRIPYYVGPLARGNSRFAWMTRKSEETITPWNFEEVVDKGASAQSFIERMTNFDKNLPNEKVLPKHSLLYEYFTVYNELTKVKYVTEGMRKPAFLSGEQKKAIVDLLFKTNRKVTVKQLKEDYFKKIECFDSVEISGVEDRFNASLGTYHDLLKIIKDKDFLDNEENEDILEDIVLTLTLFEDREMIEERLKTYAHLFDDKVMKQLKRRRYTGWGRLSRKLINGIRDKQSGKTILDFLKSDGFANRNFMQLIHDDSLTFKEDIQKAQVSGQGDSLHEHIANLAGSPAIKKGILQTVKVVDELVKVMGRHKPENIVIEMARENQTTQKGQKNSRERMKRIEEGIKELGSQILKEHPVENTQLQNEKLYLYYLQNGRDMYVDQELDINRLSDYDVDHIVPQSFLKDDSIDNKVLTRSDKNRGKSDNVPSEEVVKKMKNYWRQLLNAKLITQRKFDNLTKAERGGLSELDKAGFIKRQLVETRQITKHVAQILDSRMNTKYDENDKLIREVKVITLKSKLVSDFRKDFQFYKVREINNYHHAHDAYLNAVVGTALIKKYPKLGSSGSETPGTSESATPESSGSEVEFSHEYWMRHALTLAKRARDEREVPVGAVLVLNNRVIGEGWNRAIGLHDPTAHAEIMALRQGGLVMQNYRLIDATLYVTFEPCVMCAGAMIHSRIGRVVFGVRNAKTGAAGSLMDVLHYPGMNHRVEITEGILADECAALLCYFFRMPRQESEFVYGDYKVYDVRKMIAKSEQEIGKATAKYFFYSNIMNFFKTEITLANGEIRKRPLIETNGETGEIVWDKGRDFATVRKVLSMPQVNIVKKTEVQTGGFSKESILPKRNSDKLIARKKDWDPKKYGGFDSPTVAYSVLVVAKVEKGKSKKLKSVKELLGITIMERSSFEKNPIDFLEAKGYKEVKKDLIIKLPKYSLFELENGRKRMLASAGELQKGNELALPSKYVNFLYLASHYEKLKGSPEDNEQKQLFVEQHKHYLDEIIEQISEFSKRVILADANLDKVLSAYNKHRDKPIREQAENIIHLFTLTNLGAPAAFKYFDTTIDRKRYTSTKEVLDATLIHQSITGLYETRIDLSQLGGD

SEQ ID NO: 146 - protein, 1541 aa, Artificial Sequence
  Description of Artificial Sequence: Synthetic polypeptide
MDKKYSIGLAIGTNSVGWAVITDEYKVPSKKFKVLGNTDRHSIKKNLIGALLFDSGETAEATRLKRTARRRYTRRKNRICYLQEIFSNEMAKVDDSFFHRLEESFLVEEDKKHERHPIFGNIVDEVAYHEKYPTIYHLRKKLVDSTDKADLRLIYLALAHMIKFRGHFLIEGDLNPDNSDVDKLFIQLVQTYNQLFEENPINASGVDAKAILSARLSKSRRLENLIAQLPGEKKNGLFGNLIALSLGLTPNFKSNFDLAEDAKLQLSKDTYDDDLDNLLAQIGDQYADLFLAAKNLSDAILLSDILRVNTEITKAPLSASMIKRYDEHHQDLTLLKALVRQQLPEKYKEIFFDQSKNGYAGYIDGGASQEEFYKFIKPILEKMDGTEELLVKLNREDLLRKQRTFDNGSIPHQIHLGELHAILRRQEDFYPFLKDNREKIEKILTFRIPYYVGPLARGNSRFAWMTRKSEETITPWNFEEVVDKGASAQSFIERMTNFDKNLPNEKVLPKHSLLYEYFTVYNELTKVKYVTEGMRKPAFLSGEQKKAIVDLLFKTNRKVTVKQLKEDYFKKIECFDSVEISGVEDRFNASLGTYHDLLKIIKDKDFLDNEENEDILEDIVLTLTLFEDREMIEERLKTYAHLFDDKVMKQLKRRRYTGWGRLSRKLINGIRDKQSGKTILDFLKSDGFANRNFMQLIHDDSLTFKEDIQKAQVSGQGDSLHEHIANLAGSPAIKKGILQTVKVVDELVKVMGRHKPENIVIEMARENQTTQKGQKNSRERMKRIEEGIKELGSQILKEHPVENTQLQNEKLYLYYLQNGRDMYVDQELDINRLSDYDVDHIVPQSFLKDDSIDNKVLTRSDKNRGKSDNVPSEEVVKKMKNYWRQLLNAKLITQRKFDNLTKAERGGLSELDKAGFIKRQLVETRQITKHVAQILDSRMNTKYDENDKLIREVKVITLKSKLVSDFRKDFQFYKVREINNYHHAHDAYLNAVVGTALIKKYPKLEGSSGSETPGTSESATPESSGSEVEFSHEYWMRHALTLAKRARDEREVPVGAVLVLNNRVIGEGWNRAIGLHDPTAHAEIMALRQGGLVMQNYRLIDATLYVTFEPCVMCAGAMIHSRIGRVVFGVRNAKTGAAGSLMDVLHYPGMNHRVEITEGILADECAALLCYFFRMPRQSEFVYGDYKVYDVRKMIAKSEQEIGKATAKYFFYSNIMNFFKTEITLANGEIRKRPLIETNGETGEIVWDKGRDFATVRKVLSMPQVNIVKKTEVQTGGFSKESILPKRNSDKLIARKKDWDPKKYGGFDSPTVAYSVLVVAKVEKGKSKKLKSVKELLGITIMERSSFEKNPIDFLEAKGYKEVKKDLIIKLPKYSLFELENGRKRMLASAGELQKGNELALPSKYVNFLYLASHYEKLKGSPEDNEQKQLFVEQHKHYLDEIIEQISEFSKRVILADANLDKVLSAYNKHRDKPIREQAENIIHLFTLTNLGAPAAFKYFDTTIDRKRYTSTKEVLDATLIHQSITGLYETRIDLSQLGGD

SEQ ID NO: 147 - protein, 1541 aa, Artificial Sequence
  Description of Artificial Sequence: Synthetic polypeptide
MDKKYSIGLAIGTNSVGWAVITDEYKVPSKKFKVLGNTDRHSIKKNLIGALLFDSGETAEATRLKRTARRRYTRRKNRICYLQEIFSNEMAKVDDSFFHRLEESFLVEEDKKHERHPIFGNIVDEVAYHEKYPTIYHLRKKLVDSTDKADLRLIYLALAHMIKFRGHFLIEGDLNPDNSDVDKLFIQLVQTYNQLFEENPINASGVDAKAILSARLSKSRRLENLIAQLPGEKKNGLFGNLIALSLGLTPNFKSNFDLAEDAKLQLSKDTYDDDLDNLLAQIGDQYADLFLAAKNLSDAILLSDILRVNTEITKAPLSASMIKRYDEHHQDLTLLKALVRQQLPEKYKEIFFDQSKNGYAGYIDGGASQEEFYKFIKPILEKMDGTEELLVKLNREDLLRKQRTFDNGSIPHQIHLGELHAILRRQEDFYPFLKDNREKIEKILTFRIPYYVGPLARGNSRFAWMTRKSEETITPWNFEEVVDKGASAQSFIERMTNFDKNLPNEKVLPKHSLLYEYFTVYNELTKVKYVTEGMRKPAFLSGEQKKAIVDLLFKTNRKVTVKQLKEDYFKKIECFDSVEISGVEDRFNASLGTYHDLLKIIKDKDFLDNEENEDILEDIVLTLTLFEDREMIEERLKTYAHLFDDKVMKQLKRRRYTGWGRLSRKLINGIRDKQSGKTILDFLKSDGFANRNFMQLIHDDSLTFKEDIQKAQVSGQGDSLHEHIANLAGSPAIKKGILQTVKVVDELVKVMGRHKPENIVIEMARENQTTQKGQKNSRERMKRIEEGIKELGSQILKEHPVENTQLQNEKLYLYYLQNGRDMYVDQELDINRLSDYDVDHIVPQSFLKDDSIDNKVLTRSDKNRGKSDNVPSEEVVKKMKNYWRQLLNAKLITQRKFDNLTKAERGGLSELDKAGFIKRQLVETRQITKHVAQILDSRMNTKYDENDKLIREVKVITLKSKLVSDFRKDFQFYKVREINNYHHAHDAYLNAVVGTALIKKYPKLESGSSGSETPGTSESATPESSGSEVEFSHEYWMRHALTLAKRARDEREVPVGAVLVLNNRVIGEGWNRAIGLHDPTAHAEIMALRQGGLVMQNYRLIDATLYVTFEPCVMCAGAMIHSRIGRVVFGVRNAKTGAAGSLMDVLHYPGMNHRVEITEGILADECAALLCYFFRMPRQEFVYGDYKVYDVRKMIAKSEQEIGKATAKYFFYSNIMNFFKTEITLANGEIRKRPLIETNGETGEIVWDKGRDFATVRKVLSMPQVNIVKKTEVQTGGFSKESILPKRNSDKLIARKKDWDPKKYGGFDSPTVAYSVLVVAKVEKGKSKKLKSVKELLGITIMERSSFEKNPIDFLEAKGYKEVKKDLIIKLPKYSLFELENGRKRMLASAGELQKGNELALPSKYVNFLYLASHYEKLKGSPEDNEQKQLFVEQHKHYLDEIIEQISEFSKRVILADANLDKVLSAYNKHRDKPIREQAENIIHLFTLTNLGAPAAFKYFDTTIDRKRYTSTKEVLDATLIHQSITGLYETRIDLSQLGGD

SEQ ID NO: 148 - protein, 1541 aa, Artificial Sequence
  Description of Artificial Sequence: Synthetic polypeptide
MDKKYSIGLAIGTNSVGWAVITDEYKVPSKKFKVLGNTDRHSIKKNLIGALLFDSGETAEATRLKRTARRRYTRRKNRICYLQEIFSNEMAKVDDSFFHRLEESFLVEEDKKHERHPIFGNIVDEVAYHEKYPTIYHLRKKLVDSTDKADLRLIYLALAHMIKFRGHFLIEGDLNPDNSDVDKLFIQLVQTYNQLFEENPINASGVDAKAILSARLSKSRRLENLIAQLPGEKKNGLFGNLIALSLGLTPNFKSNFDLAEDAKLQLSKDTYDDDLDNLLAQIGDQYADLFLAAKNLSDAILLSDILRVNTEITKAPLSASMIKRYDEHHQDLTLLKALVRQQLPEKYKEIFFDQSKNGYAGYIDGGASQEEFYKFIKPILEKMDGTEELLVKLNREDLLRKQRTFDNGSIPHQIHLGELHAILRRQEDFYPFLKDNREKIEKILTFRIPYYVGPLARGNSRFAWMTRKSEETITPWNFEEVVDKGASAQSFIERMTNFDKNLPNEKVLPKHSLLYEYFTVYNELTKVKYVTEGMRKPAFLSGEQKKAIVDLLFKTNRKVTVKQLKEDYFKKIECFDSVEISGVEDRFNASLGTYHDLLKIIKDKDFLDNEENEDILEDIVLTLTLFEDREMIEERLKTYAHLFDDKVMKQLKRRRYTGWGRLSRKLINGIRDKQSGKTILDFLKSDGFANRNFMQLIHDDSLTFKEDIQKAQVSGQGDSLHEHIANLAGSPAIKKGILQTVKVVDELVKVMGRHKPENIVIEMARENQTTQKGQKNSRERMKRIEEGIKELGGSSGSETPGTSESATPESSGSEVEFSHEYWMRHALTLAKRARDEREVPVGAVLVLNNRVIGEGWNRAIGLHDPTAHAEIMALRQGGLVMQNYRLIDATLYVTFEPCVMCAGAMIHSRIGRVVFGVRNAKTGAAGSLMDVLHYPGMNHRVEITEGILADECAALLCYFFRMPRQSQILKEHPVENTQLQNEKLYLYYLQNGRDMYVDQELDINRLSDYDVDHIVPQSFLKDDSIDNKVLTRSDKNRGKSDNVPSEEVVKKMKNYWRQLLNAKLITQRKFDNLTKAERGGLSELDKAGFIKRQLVETRQITKHVAQILDSRMNTKYDENDKLIREVKVITLKSKLVSDFRKDFQFYKVREINNYHHAHDAYLNAVVGTALIKKYPKLESEFVYGDYKVYDVRKMIAKSEQEIGKATAKYFFYSNIMNFFKTEITLANGEIRKRPLIETNGETGEIVWDKGRDFATVRKVLSMPQVNIVKKTEVQTGGFSKESILPKRNSDKLIARKKDWDPKKYGGFDSPTVAYSVLVVAKVEKGKSKKLKSVKELLGITIMERSSFEKNPIDFLEAKGYKEVKKDLIIKLPKYSLFELENGRKRMLASAGELQKGNELALPSKYVNFLYLASHYEKLKGSPEDNEQKQLFVEQHKHYLDEIIEQISEFSKRVILADANLDKVLSAYNKHRDKPIREQAENIIHLFTLTNLGAPAAFKYFDTTIDRKRYTSTKEVLDATLIHQSITGLYETRIDLSQLGGD

SEQ ID NO: 149 - protein, 1541 aa, Artificial Sequence
  Description of Artificial Sequence: Synthetic polypeptide
MDKKYSIGLAIGTNSVGWAVITDEYKVPSKKFKVLGNTDRHSIKKNLIGALLFDSGETAEATRLKRTARRRYTRRKNRICYLQEIFSNEMAKVDDSFFHRLEESFLVEEDKKHERHPIFGNIVDEVAYHEKYPTIYHLRKKLVDSTDKADLRLIYLALAHMIKFRGHFLIEGDLNPDNSDVDKLFIQLVQTYNQLFEENPINASGVDAKAILSARLSKSRRLENLIAQLPGEKKNGLFGNLIALSLGLTPNFKSNFDLAEDAKLQLSKDTYDDDLDNLLAQIGDQYADLFLAAKNLSDAILLSDILRVNTEITKAPLSASMIKRYDEHHQDLTLLKALVRQQLPEKYKEIFFDQSKNGYAGYIDGGASQEEFYKFIKPILEKMDGTEELLVKLNREDLLRKQRTFDNGSIPHQIHLGELHAILRRQEDFYPFLKDNREKIEKILTFRIPYYVGPLARGNSRFAWMTRKSEETITPWNFEEVVDKGASAQSFIERMTNFDKNLPNEKVLPKHSLLYEYFTVYNELTKVKYVTEGMRKPAFLSGEQKKAIVDLLFKTNRKVTVKQLKEDYFKKIECFDSVEISGVEDRFNASLGTYHDLLKIIKDKDFLDNEENEDILEDIVLTLTLFEDREMIEERLKTYAHLFDDKVMKQLKRRRYTGWGRLSRKLINGIRDKQSGKTILDFLKSDGFANRNFMQLIHDDSLTFKEDIQKAQVSGQGDSLHEHIANLAGSPAIKKGILQTVKVVDELVKVMGRHKPENIVIEMARENQTTQKGQKNSRERMKRIEEGIKELGSSGSETPGTSESATPESSGSEVEFSHEYWMRHALTLAKRARDEREVPVGAVLVLNNRVIGEGWNRAIGLHDPTAHAEIMALRQGGLVMQNYRLIDATLYVTFEPCVMCAGAMIHSRIGRVVFGVRNAKTGAAGSLMDVLHYPGMNHRVEITEGILADECAALLCYFFRMPRQGSQILKEHPVENTQLQNEKLYLYYLQNGRDMYVDQELDINRLSDYDVDHIVPQSFLKDDSIDNKVLTRSDKNRGKSDNVPSEEVVKKMKNYWRQLLNAKLITQRKFDNLTKAERGGLSELDKAGFIKRQLVETRQITKHVAQILDSRMNTKYDENDKLIREVKVITLKSKLVSDFRKDFQFYKVREINNYHHAHDAYLNAVVGTALIKKYPKLESEFVYGDYKVYDVRKMIAKSEQEIGKATAKYFFYSNIMNFFKTEITLANGEIRKRPLIETNGETGEIVWDKGRDFATVRKVLSMPQVNIVKKTEVQTGGFSKESILPKRNSDKLIARKKDWDPKKYGGFDSPTVAYSVLVVAKVEKGKSKKLKSVKELLGITIMERSSFEKNPIDFLEAKGYKEVKKDLIIKLPKYSLFELENGRKRMLASAGELQKGNELALPSKYVNFLYLASHYEKLKGSPEDNEQKQLFVEQHKHYLDEIIEQISEFSKRVILADANLDKVLSAYNKHRDKPIREQAENIIHLFTLTNLGAPAAFKYFDTTIDRKRYTSTKEVLDATLIHQSITGLYETRIDLSQLGGD

SEQ ID NO: 150 - protein, 1541 aa, Artificial Sequence
  Description of Artificial Sequence: Synthetic polypeptide
MDKKYSIGLAIGTNSVGWAVITDEYKVPSKKFKVLGNTDRHSIKKNLIGALLFDSGETAEATRLKRTARRRYTRRKNRICYLQEIFSNEMAKVDDSFFHRLEESFLVEEDKKHERHPIFGNIVDEVAYHEKYPTIYHLRKKLVDSTDKADLRLIYLALAHMIKFRGHFLIEGDLNPDNSDVDKLFIQLVQTYNQLFEENPINASGVDAKAILSARLSKSRRLENLIAQLPGEKKNGLFGNLIALSLGLTPNFKSNFDLAEDAKLQLSKDTYDDDLDNLLAQIGDQYADLFLAAKNLSDAILLSDILRVNTEITKAPLSASMIKRYDEHHQDLTLLKALVRQQLPEKYKEIFFDQSKNGYAGYIDGGASQEEFYKFIKPILEKMDGTEELLVKLNREDLLRKQRTFDNGSIPHQIHLGELHAILRRQEDFYPFLKDNREKIEKILTFRIPYYVGPLARGNSRFAWMTRKSEETITPWNFEEVVDKGASAQSFIERMTNFDKNLPNEKVLPKHSLLYEYFTVYNELTKVKYVTEGMRKPAFLSGEQKKAIVDLLFKTNRKVTVKQLKEDYFKKIECFDSVEISGVEDRFNASLGTYHDLLKIIKDKDFLDNEENEDILEDIVLTLTLFEDREMIEERLKTYAHLFDDKVMKQLKRRRYTGWGRLSRKLINGIRDKQSGKTILDFLKSDGFANRNFMQLIHDDSLTFKEDIQKAQVSGQGDSLHEHIANLAGSPAIKKGILQTVKVVDELVKVMGRHKPENIVIEMARENQTTQKGQKNSRERMKRIEEGIKEGSSGSETPGTSESATPESSGSEVEFSHEYWMRHALTLAKRARDEREVPVGAVLVLNNRVIGEGWNRAIGLHDPTAHAEIMALRQGGLVMQNYRLIDATLYVTFEPCVMCAGAMIHSRIGRVVFGVRNAKTGAAGSLMDVLHYPGMNHRVEITEGILADECAALLCYFFRMPRQLGSQILKEHPVENTQLQNEKLYLYYLQNGRDMYVDQELDINRLSDYDVDHIVPQSFLKDDSIDNKVLTRSDKNRGKSDNVPSEEVVKKMKNYWRQLLNAKLITQRKFDNLTKAERGGLSELDKAGFIKRQLVETRQITKHVAQILDSRMNTKYDENDKLIREVKVITLKSKLVSDFRKDFQFYKVREINNYHHAHDAYLNAVVGTALIKKYPKLESEFVYGDYKVYDVRKMIAKSEQEIGKATAKYFFYSNIMNFFKTEITLANGEIRKRPLIETNGETGEIVWDKGRDFATVRKVLSMPQVNIVKKTEVQTGGFSKESILPKRNSDKLIARKKDWDPKKYGGFDSPTVAYSVLVVAKVEKGKSKKLKSVKELLGITIMERSSFEKNPIDFLEAKGYKEVKKDLIIKLPKYSLFELENGRKRMLASAGELQKGNELALPSKYVNFLYLASHYEKLKGSPEDNEQKQLFVEQHKHYLDEIIEQISEFSKRVILADANLDKVLSAYNKHRDKPIREQAENIIHLFTLTNLGAPAAFKYFDTTIDRKRYTSTKEVLDATLIHQSITGLYETRIDLSQLGGD

SEQ ID NO: 151 - protein, 1484 aa, Artificial Sequence
  Description of Artificial Sequence: Synthetic polypeptide
MDKKYSIGLAIGTNSVGWAVITDEYKVPSKKFKVLGNTDRHSIKKNLIGALLFDSGETAEATRLKRTARRRYTRRKNRICYLQEIFSNEMAKVDDSFFHRLEESFLVEEDKKHERHPIFGNIVDEVAYHEKYPTIYHLRKKLVDSTDKADLRLIYLALAHMIKFRGHFLIEGDLNPDNSDVDKLFIQLVQTYNQLFEENPINASGVDAKAILSARLSKSRRLENLIAQLPGEKKNGLFGNLIALSLGLTPNFKSNFDLAEDAKLQLSKDTYDDDLDNLLAQIGDQYADLFLAAKNLSDAILLSDILRVNTEITKAPLSASMIKRYDEHHQDLTLLKALVRQQLPEKYKEIFFDQSKNGYAGYIDGGASQEEFYKFIKPILEKMDGTEELLVKLNREDLLRKQRTFDNGSIPHQIHLGELHAILRRQEDFYPFLKDNREKIEKILTFRIPYYVGPLARGNSRFAWMTRKSEETITPWNFEEVVDKGASAQSFIERMTNFDKNLPNEKVLPKHSLLYEYFTVYNELTKVKYVTEGMRKPAFLSGEQKKAIVDLLFKTNRKVTVKQLKEDYFKKIECFDSVEISGVEDRFNASLGTYHDLLKIIKDKDFLDNEENEDILEDIVLTLTLFEDREMIEERLKTYAHLFDDKVMKQLKRRRYTGWGRLSRKLINGIRDKQSGKTILDFLKSDGFANRNFMQLIHDDSLTFKEDIQKAQVSGQGDSLHEHIANLAGSPAIKKGILQTVKVVDELVKVMGRHKPENIVIEMARENQTTQKGQKNSRERMKRIEEGIKELGSQILKEHPVENTQLQNEKLYLYYLQNGRDMYVDQELDINRLSDYDVDHIVPQSFLKDDSIDNKVLTRSDKNRGKSDNVPSEEVVKKMKNYWRQLLNAKLITQRKFDNLTKAERGGLSELDKAGFIKRQLVETRQITKHVAQILDSRMNTKYDENDKLIREVKVITLKSKLVSDFRKDFQFYKVREINNYHHAHDAYLNAVVGTALIKKYPKLESEFVYGDYKVYSSGSEVEFSHEYWMRHALTLAKRARDEREVPVGAVLVLNNRVIGEGWNRAIGLHDPTAHAEIMALRQGGLVMQNYRLIDATLYVTFEPCVMCAGAMIHSRIGRVVFGVRNAKTGAAGSLMDVLHYPGMNHRVEITEGILADECAALLCYFFRMPRQVFNAQKKAQSSTDGEIVWDKGRDFATVRKVLSMPQVNIVKKTEVQTGGFSKESILPKRNSDKLIARKKDWDPKKYGGFDSPTVAYSVLVVAKVEKGKSKKLKSVKELLGITIMERSSFEKNPIDFLEAKGYKEVKKDLIIKLPKYSLFELENGRKRMLASAGELQKGNELALPSKYVNFLYLASHYEKLKGSPEDNEQKQLFVEQHKHYLDEIIEQISEFSKRVILADANLDKVLSAYNKHRDKPIREQAENIIHLFTLTNLGAPAAFKYFDTTIDRKRYTSTKEVLDATLIHQSITGLYETRIDLSQLGGD

SEQ ID NO: 152 - protein, 1554 aa, Artificial Sequence
  Description of Artificial Sequence: Synthetic polypeptide
MDKKYSIGLAIGTNSVGWAVITDEYKVPSKKFKVLGNTDRHSIKKNLIGALLFDSGETAEATRLKRTARRRYTRRKNRICYLQEIFSNEMAKVDDSFFHRLEESFLVEEDKKHERHPIFGNIVDEVAYHEKYPTIYHLRKKLVDSTDKADLRLIYLALAHMIKFRGHFLIEGDLNPDNSDVDKLFIQLVQTYNQLFEENPINASGVDAKAILSARLSKSRRLENLIAQLPGEKKNGLFGNLIALSLGLTPNFKSNFDLAEDAKLQLSKDTYDDDLDNLLAQIGDQYADLFLAAKNLSDAILLSDILRVNTEITKAPLSASMIKRYDEHHQDLTLLKALVRQQLPEKYKEIFFDQSKNGYAGYIDGGASQEEFYKFIKPILEKMDGTEELLVKLNREDLLRKQRTFDNGSIPHQIHLGELHAILRRQEDFYPFLKDNREKIEKILTFRIPYYVGPLARGNSRFAWMTRKSEETITPWNFEEVVDKGASAQSFIERMTNFDKNLPNEKVLPKHSLLYEYFTVYNELTKVKYVTEGMRKPAFLSGEQKKAIVDLLFKTNRKVTVKQLKEDYFKKIECFDSVEISGVEDRFNASLGTYHDLLKIIKDKDFLDNEENEDILEDIVLTLTLFEDREMIEERLKTYAHLFDDKVMKQLKRRRYTGWGRLSRKLINGIRDKQSGKTILDFLKSDGFANRNFMQLIHDDSLTFKEDIQKAQVSGQGDSLHEHIANLAGSPAIKKGILQTVKVVDELVKVMGRHKPENIVIEMARENQTTQKGQKNSRERMKRIEEGIKELGSQILKEHPVENTQLQNEKLYLYYLQNGRDMYVDQELDINRLSDYDVDHIVPQSFLKDDSIDNKVLTRSDKNRGKSDNVPSEEVVKKMKNYWRQLLNAKLITQRKFDNLTKAERGGLSELDKAGFIKRQLVETRQITKHVAQILDSRMNTKYDENDKLIREVKVITLKSKLVSDFRKDFQFYKVREINNYHHAHDAYLNAVVGTALIKKYPKLESEFVYGDYKVYDVRKMIAKSEQEIGKATAKYFFYSNIMNFFKTEITLANGEIRKRPLIETNMNHRVEITEGILADECAALLCYFFRMPRQVFNAQKKAQSSTDGSSGSETPGTSESATPESSGSEVEFSHEYWMRHALTLAKRARDEREVPVGAVLVLNNRVIGEGWNRAIGLHDPTAHAEIMALRQGGLVMQNYRLIDATLYVTFEPCVMCAGAMIHSRIGRVVFGVRNAKTGAAGSLMDVLHYPGGETGEIVWDKGRDFATVRKVLSMPQVNIVKKTEVQTGGFSKESILPKRNSDKLIARKKDWDPKKYGGFDSPTVAYSVLVVAKVEKGKSKKLKSVKELLGITIMERSSFEKNPIDFLEAKGYKEVKKDLIIKLPKYSLFELENGRKRMLASAGELQKGNELALPSKYVNFLYLASHYEKLKGSPEDNEQKQLFVEQHKHYLDEIIEQISEFSKRVILADANLDKVLSAYNKHRDKPIREQAENIIHLFTLTNLGAPAAFKYFDTTIDRKRYTSTKEVLDATLIHQSITGLYETRIDLSQLGGD

SEQ ID NO: 153 - protein, 1554 aa, Artificial Sequence
  Description of Artificial Sequence: Synthetic polypeptide
MDKKYSIGLAIGTNSVGWAVITDEYKVPSKKFKVLGNTDRHSIKKNLIGALLFDSGETAEATRLKRTARRRYTRRKNRICYLQEIFSNEMAKVDDSFFHRLEESFLVEEDKKHERHPIFGNIVDEVAYHEKYPTIYHLRKKLVDSTDKADLRLIYLALAHMIKFRGHFLIEGDLNPDNSDVDKLFIQLVQTYNQLFEENPINASGVDAKAILSARLSKSRRLENLIAQLPGEKKNGLFGNLIALSLGLTPNFKSNFDLAEDAKLQLSKDTYDDDLDNLLAQIGDQYADLFLAAKNLSDAILLSDILRVNTEITKAPLSASMIKRYDEHHQDLTLLKALVRQQLPEKYKEIFFDQSKNGYAGYIDGGASQEEFYKFIKPILEKMDGTEELLVKLNREDLLRKQRTFDNGSIPHQIHLGELHAILRRQEDFYPFLKDNREKIEKILTFRIPYYVGPLARGNSRFAWMTRKSEETITPWNFEEVVDKGASAQSFIERMTNFDKNLPNEKVLPKHSLLYEYFTVYNELTKVKYVTEGMRKPAFLSGEQKKAIVDLLFKTNRKVTVKQLKEDYFKKIECFDSVEISGVEDRFNASLGTYHDLLKIIKDKDFLDNEENEDILEDIVLTLTLFEDREMIEERLKTYAHLFDDKVMKQLKRRRYTGWGRLSRKLINGIRDKQSGKTILDFLKSDGFANRNFMQLIHDDSGSSGSETPGTSESATPESSGSEVEFSHEYWMRHALTLAKRARDEREVPVGAVLVLNNRVIGEGWNRAIGLHDPTAHAEIMALRQGGLVMQNYRLIDATLYVTFEPCVMCAGAMIHSRIGRVVFGVRNAKTGAAGSLMDVLHYPGMNHRVEITEGILADECAALLCYFFRMPRQVFNAQKKAQSSTDLTFKEDIQKAQVSGQGDSLHEHIANLAGSPAIKKGILQTVKVVDELVKVMGRHKPENIVIEMARENQTTQKGQKNSRERMKRIEEGIKELGSQILKEHPVENTQLQNEKLYLYYLQNGRDMYVDQELDINRLSDYDVDHIVPQSFLKDDSIDNKVLTRSDKNRGKSDNVPSEEVVKKMKNYWRQLLNAKLITQRKFDNLTKAERGGLSELDKAGFIKRQLVETRQITKHVAQILDSRMNTKYDENDKLIREVKVITLKSKLVSDFRKDFQFYKVREINNYHHAHDAYLNAVVGTALIKKYPKLESEFVYGDYKVYDVRKMIAKSEQEIGKATAKYFFYSNIMNFFKTEITLANGEIRKRPLIETNGETGEIVWDKGRDFATVRKVLSMPQVNIVKKTEVQTGGFSKESILPKRNSDKLIARKKDWDPKKYGGFDSPTVAYSVLVVAKVEKGKSKKLKSVKELLGITIMERSSFEKNPIDFLEAKGYKEVKKDLIIKLPKYSLFELENGRKRMLASAGELQKGNELALPSKYVNFLYLASHYEKLKGSPEDNEQKQLFVEQHKHYLDEIIEQISEFSKRVILADANLDKVLSAYNKHRDKPIREQAENIIHLFTLTNLGAPAAFKYFDTTIDRKRYTSTKEVLDATLIHQSITGLYETRIDLSQLGGD

SEQ ID NO: 154 - protein, 1554 aa, Artificial Sequence
  Description of Artificial Sequence: Synthetic polypeptide
MDKKYSIGLAIGTNSVGWAVITDEYKVPSKKFKVLGNTDRHSIKKNLIGALLFDSGETAEATRLKRTARRRYTRRKNRICYLQEIFSNEMAKVDDSFFHRLEESFLVEEDKKHERHPIFGNIVDEVAYHEKYPTIYHLRKKLVDSTDKADLRLIYLALAHMIKFRGHFLIEGDLNPDNSDVDKLFIQLVQTYNQLFEENPINASGVDAKAILSARLSKSRRLENLIAQLPGEKKNGLFGNLIALSLGLTPNFKSNFDLAEDAKLQLSKDTYDDDLDNLLAQIGDQYADLFLAAKNLSDAILLSDILRVNTEITKAPLSASMIKRYDEHHQDLTLLKALVRQQLPEKYKEIFFDQSKNGYAGYIDGGASQEEFYKFIKPILEKMDGTEELLVKLNREDLLRKQRTFDNGSIPHQIHLGELHAILRRQEDFYPFLKDNREKIEKILTFRIPYYVGPLARGNSRFAWMTRKSEETITPWNFEEVVDKGASAQSFIERMTNFDKNLPNEKVLPKHSLLYEYFTVYNELTKVKYVTEGMRKPAFLSGEQKKAIVDLLFKTNRKVTVKQLKEDYFKKIECFDSVEISGVEDRFNASLGTYHDLLKIIKDKDFLDNEENEDILEDIVLTLTLFEDREMIEERLKTYAHLFDDKVMKQLKRRRYTGWGRLSRKLINGIRDKQSGKTILDFLKSDGFANRNFMQLIHDDSLTFKEDIQKAQVSGQGDSLHEHIANLAGSPAIKKGILQTVKVVDELVKVMGRHKPENIVIEMARENQTTQKGQKNSRERMKRIEEGIKELGSQILKEHPVENTQLQNEKLYLYYLQNGRDMYVDQELDINRLSDYDVDHIVPQSFLKDDSIDNKVLTRSDKNRGKSDNVPSEEVVKKMKNYWRQLLNAKLITQRKFDNLTKAERGGLSELDKAGFIKRQLVETRQITKHVAQILDSRMNTKYDENDKLIREVKVITLKSKLVSDFRKDFQFYKVREINNYHHAHDAYLNAVVGTALIKKYPKLESEFVYGDYKVYDVRKMIAKSEQEIGKATAKYFFYSNIMNFFKTEITLANGEIRKRPLIETNGETGEIVWDKGRDFATVRKVLSMPQVNIVKKTEVQTGGFSKESILPKRNSDKLIARKKDWDPKKYGGFDSPTVAYSVLVVAKVEKGKSKKLKSVKELLGITIMERSSFEKNPIDFLEAKGYKEVKKDLIIKLPKYSLFELENGRKRMLASAGELQKGNELALPSKYVNFLYLASHYEKLKGSMNHRVEITEGILADECAALLCYFFRMPRQVFNAQKKAQSSTDGSSGSETPGTSESATPESSGSEVEFSHEYWMRHALTLAKRARDEREVPVGAVLVLNNRVIGEGWNRAIGLHDPTAHAEIMALRQGGLVMQNYRLIDATLYVTFEPCVMCAGAMIHSRIGRVVFGVRNAKTGAAGSLMDVLHYPGPEDNEQKQLFVEQHKHYLDEIIEQISEFSKRVILADANLDKVLSAYNKHRDKPIREQAENIIHLFTLTNLGAPAAFKYFDTTIDRKRYTSTKEVLDATLIHQSITGLYETRIDLSQLGGD

SEQ ID NO: 155 - protein, 1554 aa, Artificial Sequence
  Description of Artificial Sequence: Synthetic polypeptide
MDKKYSIGLAIGTNSVGWAVITDEYKVPSKKFKVLGNTDRHSIKKNLIGALLFDSGETAEATRLKRTARRRYTRRKNRICYLQEIFSNEMAKVDDSFFHRLEESFLVEEDKKHERHPIFGNIVDEVAYHEKYPTIYHLRKKLVDSTDKADLRLIYLALAHMIKFRGHFLIEGDLNPDNSDVDKLFIQLVQTYNQLFEENPINASGVDAKAILSARLSKSRRLENLIAQLPGEKKNGLFGNLIALSLGLTPNFKSNFDLAEDAKLQLSKDTYDDDLDNLLAQIGDQYADLFLAAKNLSDAILLSDILRVNTEITKAPLSASMIKRYDEHHQDLTLLKALVRQQLPEKYKEIFFDQSKNGYAGYIDGGASQEEFYKFIKPILEKMDGTEELLVKLNREDLLRKQRTFDNGSIPHQIHLGELHAILRRQEDFYPFLKDNREKIEKILTFRIPYYVGPLARGNSRFAWMTRKSEETITPWNFEEVVDKGASAQSFIERMTNFDKNLPNEKVLPKHSLLYEYFTVYNELTKVKYVTEGMRKPAFLSGEQKKAIVDLLFKTNRKVTVKQLKEDYFKKIECFDSVEISGVEDRFNASLGTYHDLLKIIKDKDFLDNEENEDILEDIVLTLTLFEDREMIEERLKTYAHLFDDKVMKQLKRRRYTGWGRLSRKLINGIRDKQSGKTILDFLKSDGFANRNFMQLIHDDSLTFKEDIQKAQVSGQGDSLHEHIANLAGSPAIKKGILQTVKVVDELVKVMGRHKPENIVIEMARENQTTQKGQKNSRERMKRIEEGIKELGSQILKEHPVENTQLQNEKLYLYYLQNGRDMYVDQELDINRLSDYDVDHIVPQSFLKDDSIDNKVLTRSDKNRGKSDNVPSEEVVKKMKNYWRQLLNAKLITQRKFDNLTKAERGGLSELDKAGFIKRQLVETRQITKHVAQILDSRMNTKYDENDKLIREVKVITLKSKLVSDFRKDFQFYKVREINNYHHAHDAYLNAVVGTALIKKYPKLESEFVYGDYKVYDVRKMIAKSEQEIGKATAKYFFYSNIMNFFKTEITLAMNHRVEITEGILADECAALLCYFFRMPRQVFNAQKKAQSSTDGSSGSETPGTSESATPESSGSEVEFSHEYWMRHALTLAKRARDEREVPVGAVLVLNNRVIGEGWNRAIGLHDPTAHAEIMALRQGGLVMQNYRLIDATLYVTFEPCVMCAGAMIHSRIGRVVFGVRNAKTGAAGSLMDVLHYPGNGEIRKRPLIETNGETGEIVWDKGRDFATVRKVLSMPQVNIVKKTEVQTGGFSKESILPKRNSDKLIARKKDWDPKKYGGFDSPTVAYSVLVVAKVEKGKSKKLKSVKELLGITIMERSSFEKNPIDFLEAKGYKEVKKDLIIKLPKYSLFELENGRKRMLASAGELQKGNELALPSKYVNFLYLASHYEKLKGSPEDNEQKQLFVEQHKHYLDEIIEQISEFSKRVILADANLDKVLSAYNKHRDKPIREQAENIIHLFTLTNLGAPAAFKYFDTTIDRKRYTSTKEVLDATLIHQSITGLYETRIDLSQLGGD

SEQ ID NO: 156 - protein, 1554 aa, Artificial Sequence
  Description of Artificial Sequence: Synthetic polypeptide
MDKKYSIGLAIGTNSVGWAVITDEYKVPSKKFKVLGNTDRHSIKKNLIGALLFDSGETAEATRLKRTARRRYTRRKNRICYLQEIFSNEMAKVDDSFFHRLEESFLVEEDKKHERHPIFGNIVDEVAYHEKYPTIYHLRKKLVDSTDKADLRLIYLALAHMIKFRGHFLIEGDLNPDNSDVDKLFIQLVQTYNQLFEENPINASGVDAKAILSARLSKSRRLENLIAQLPGEKKNGLFGNLIALSLGLTPNFKSNFDLAEDAKLQLSKDTYDDDLDNLLAQIGDQYADLFLAAKNLSDAILLSDILRVNTEITKAPLSASMIKRYDEHHQDLTLLKALVRQQLPEKYKEIFFDQSKNGYAGYIDGGASQEEFYKFIKPILEKMDGTEELLVKLNREDLLRKQRTFDNGSIPHQIHLGELHAILRRQEDFYPFLKDNREKIEKILTFRIPYYVGPLARGNSRFAWMTRKSEETITPWNFEEVVDKGASAQSFIERMTNFDKNLPNEKVLPKHSLLYEYFTVYNELTKVKYVTEGMRKPAFLSGEQKKAIVDLLFKTNRKVTVKQLKEDYFKKIECFDSVEISGVEDRFNASLGTYHDLLKIIKDKDFLDNEENEDILEDIVLTLTLFEDREMIEERLKTYAHLFDDKVMKQLKRRRYTGWGRLSRKLINGIRDKQSGKTILDFLKSDGFANRNFMQLIHDDSLTFKEDIQKAQVSGQGDSLHEHIANLAGSPAIKKGILQTVKVVDELVKVMGRHKPENIVIEMARENQTTQKGQKNSRERMKRIEEGIKELGSQILKEHPVENTQLQNEKLYLYYLQNGRDMYVDQELDINRLSDYDVDHIVPQSFLKDDSIDNKVLTRSDKNRGKSDNVPSEEVVKKMKNYWRQLLNAKLITQRKFDNLTKAERGGLSELDKAGFIKRQLVETRQITKHVAQILDSRMNTKYDENDKLIREVKVITLKSKLVSDFRKDFQFYKVREINNYHHAHDAYLNAVVGTALIKKYPKLESEFVYGDYKVYDVRKMIAKSEQEIGKATAKYFFYSMNHRVEITEGILADECAALLCYFFRMPRQVFNAQKKAQSSTDGSSGSETPGTSESATPESSGSEVEFSHEYWMRHALTLAKRARDEREVPVGAVLVLNNRVIGEGWNRAIGLHDPTAHAEIMALRQGGLVMQNYRLIDATLYVTFEPCVMCAGAMIHSRIGRVVFGVRNAKTGAAGSLMDVLHYPGNIMNFFKTEITLANGEIRKRPLIETNGETGEIVWDKGRDFATVRKVLSMPQVNIVKKTEVQTGGFSKESILPKRNSDKLIARKKDWDPKKYGGFDSPTVAYSVLVVAKVEKGKSKKLKSVKELLGITIMERSSFEKNPIDFLEAKGYKEVKKDLIIKLPKYSLFELENGRKRMLASAGELQKGNELALPSKYVNFLYLASHYEKLKGSPEDNEQKQLFVEQHKHYLDEIIEQISEFSKRVILADANLDKVLSAYNKHRDKPIREQAENIIHLFTLTNLGAPAAFKYFDTTIDRKRYTSTKEVLDATLIHQSITGLYETRIDLSQLGGD

SEQ ID NO: 157 - protein, 1554 aa, Artificial Sequence
  Description of Artificial Sequence: Synthetic polypeptide
MDKKYSIGLAIGTNSVGWAVITDEYKVPSKKFKVLGNTDRHSIKKNLIGALLFDSGETAEATRLKRTARRRYTRRKNRICYLQEIFSNEMAKVDDSFFHRLEESFLVEEDKKHERHPIFGNIVDEVAYHEKYPTIYHLRKKLVDSTDKADLRLIYLALAHMIKFRGHFLIEGDLNPDNSDVDKLFIQLVQTYNQLFEENPINASGVDAKAILSARLSKSRRLENLIAQLPGEKKNGLFGNLIALSLGLTPNFKSNFDLAEDAKLQLSKDTYDDDLDNLLAQIGDQYADLFLAAKNLSDAILLSDILRVNTEITKAPLSASMIKRYDEHHQDLTLLKALVRQQLPEKYKEIFFDQSKNGYAGYIDGGASQEEFYKFIKPILEKMDGTEELLVKLNREDLLRKQRTFDNGSIPHQIHLGELHAILRRQEDFYPFLKDNREKIEKILTFRIPYYVGPLARGNSRFAWMTRKSEETITPWNFEEVVDKGASAQSFIERMTNFDKNLPNEKVLPKHSLLYEYFTVYNELTKVKYVTEGMRKPAFLSGEQKKAIVDLLFKTNRKVTVKQLKEDYFKKIECFDSVEISGVEDRFNASLGTYHDLLKIIKDKDFLDNEENEDILEDIVLTLTLFEDREMIEERLKTYAHLFDDKVMKQLKRRRYTGWGRLSRKLINGIRDKQSGKTILDFLKSDGFANRNFMQLIHDDSLTFKEDIQKAQVSGQGDSLHEHIANLAGSPAIKKGILQTVKVVDELVKVMGRHKPENIVIEMARENQTTQKGQKNSRERMKRIEEGIKELGSQILKEHPVENTQLQNEKLYLYYLQNGRDMYVDQELDINRLSDYDVDHIVPQSFLKDDSIDNKVLTRSDKNRGKSDNVPSEEVVKKMKNYWRQLLNAKLITQRKFDNLTKAERGGLSELDKAGFIKRQLVETRQITKHVAQILDSRMNTKYDENDKLIREVKVITLKSKLVSDFRKDFQFYKVREINNYHHAHDAYLNAVVGTALIKKYPKLESEFVYGDYKVYDVRKMIAKSEQEIGKATAKYFFYSNIMNFFKTEITLANGEIRKRPLIETNGETGEIVWDKGRDFATVRKVLSMPQVNIVKKTEVQTGGFSKESILPKRNSDKLIARKKDWDPKKYGGFDSPTVAYSVLVVAKVEKGKSKKLKSVKELLGITIMERSSFEKNPIDFLEAKGYKEVKKDLIIKLPKYSLFELENGRKRMLASAGELQKGNELALPSKYVNFLYLASHYEKLKGSPEDNEQKQLFVEQHKHYLDEIIEQISEFSKRVILADANLDKVLSAYNKHRMNHRVEITEGILADECAALLCYFFRMPRQVFNAQKKAQSSTDGSSGSETPGTSESATPESSGSEVEFSHEYWMRHALTLAKRARDEREVPVGAVLVLNNRVIGEGWNRAIGLHDPTAHAEIMALRQGGLVMQNYRLIDATLYVTFEPCVMCAGAMIHSRIGRVVFGVRNAKTGAAGSLMDVLHYPGDKPIREQAENIIHLFTLTNLGAPAAFKYFDTTIDRKRYTSTKEVLDATLIHQSITGLYETRIDLSQLGGD

SEQ ID NO: 158 - protein, 1454 aa, Artificial Sequence
  Description of Artificial Sequence: Synthetic polypeptide
MDKKYSIGLAIGTNSVGWAVITDEYKVPSKKFKVLGNTDRHSIKKNLIGALLFDSGETAEATRLKRTARRRYTRRKNRICYLQEIFSNEMAKVDDSFFHRLEESFLVEEDKKHERHPIFGNIVDEVAYHEKYPTIYHLRKKLVDSTDKADLRLIYLALAHMIKFRGHFLIEGDLNPDNSDVDKLFIQLVQTYNQLFEENPINASGVDAKAILSARLSKSRRLENLIAQLPGEKKNGLFGNLIALSLGLTPNFKSNFDLAEDAKLQLSKDTYDDDLDNLLAQIGDQYADLFLAAKNLSDAILLSDILRVNTEITKAPLSASMIKRYDEHHQDLTLLKALVRQQLPEKYKEIFFDQSKNGYAGYIDGGASQEEFYKFIKPILEKMDGTEELLVKLNREDLLRKQRTFDNGSIPHQIHLGELHAILRRQEDFYPFLKDNREKIEKILTFRIPYYVGPLARGNSRFAWMTRKSEETITPWNFEEVVDKGASAQSFIERMTNFDKNLPNEKVLPKHSLLYEYFTVYNELTKVKYVTEGMRKPAFLSGEQKKAIVDLLFKTNRKVTVKQLKEDYFKKIECFDSVEISGVEDRFNASLGTYHDLLKIIKDKDFLDNEENEDILEDIVLTLTLFEDREMIEERLKTYAHLFDDKVMKQLKRRRYTGWGRLSRKLINGIRDKQSGKTILDFLKSDGFANRNFMQLIHDDSLTFKEDIQKAQVSGQGDSLHEHIANLAGSPAIKKGILQTVKVVDELVKVMGRHKPENIVIEMARENQTTQKGQKNSRERMKRIEEGIKELGSEVEFSHEYWMRHALTLAKRARDEREVPVGAVLVLNNRVIGEGWNRAIGLHDPTAHAEIMALRQGGLVMQNYRLIDATLYVTFEPCVMCAGAMIHSRIGRVVFGVRNAKTGAAGSLMDVLHYPGMNHRVEITEGILADECAALLCYFFRMPRQVFNAQKKAQSSTDEEVVKKMKNYWRQLLNAKLITQRKFDNLTKAERGGLSELDKAGFIKRQLVETRQITKHVAQILDSRMNTKYDENDKLIREVKVITLKSKLVSDFRKDFQFYKVREINNYHHAHDAYLNAVVGTALIKKYPKLESEFVYGDYKVYDVRKMIAKSEQEIGKATAKYFFYSNIMNFFKTEITLANGEIRKRPLIETNGETGEIVWDKGRDFATVRKVLSMPQVNIVKKTEVQTGGFSKESILPKRNSDKLIARKKDWDPKKYGGFDSPTVAYSVLVVAKVEKGKSKKLKSVKELLGITIMERSSFEKNPIDFLEAKGYKEVKKDLIIKLPKYSLFELENGRKRMLASAGELQKGNELALPSKYVNFLYLASHYEKLKGSPEDNEQKQLFVEQHKHYLDEIIEQISEFSKRVILADANLDKVLSAYNKHRDKPIREQAENIIHLFTLTNLGAPAAFKYFDTTIDRKRYTSTKEVLDATLIHQSITGLYETRIDLSQLGGD

SEQ ID NO: 159 - protein, 1420 aa, Artificial Sequence
  Description of Artificial Sequence: Synthetic polypeptide
MDKKYSIGLAIGTNSVGWAVITDEYKVPSKKFKVLGNTDRHSIKKNLIGALLFDSGETAEATRLKRTARRRYTRRKNRICYLQEIFSNEMAKVDDSFFHRLEESFLVEEDKKHERHPIFGNIVDEVAYHEKYPTIYHLRKKLVDSTDKADLRLIYLALAHMIKFRGHFLIEGDLNPDNSDVDKLFIQLVQTYNQLFEENPINASGVDAKAILSARLSKSRRLENLIAQLPGEKKNGLFGNLIALSLGLTPNFKSNFDLAEDAKLQLSKDTYDDDLDNLLAQIGDQYADLFLAAKNLSDAILLSDILRVNTEITKAPLSASMIKRYDEHHQDLTLLKALVRQQLPEKYKEIFFDQSKNGYAGYIDGGASQEEFYKFIKPILEKMDGTEELLVKLNREDLLRKQRTFDNGSIPHQIHLGELHAILRRQEDFYPFLKDNREKIEKILTFRIPYYVGPLARGNSRFAWMTRKSEETITPWNFEEVVDKGASAQSFIERMTNFDKNLPNEKVLPKHSLLYEYFTVYNELTKVKYVTEGMRKPAFLSGEQKKAIVDLLFKTNRKVTVKQLKEDYFKKIECFDSVEISGVEDRFNASLGTYHDLLKIIKDKDFLDNEENEDILEDIVLTLTLFEDREMIEERLKTYAHLFDDKVMKQLKRRRYTGWGRLSRKLINGIRDKQSGKTILDFLKSDGFANRNFMQLIHDDSLTFKEDIQKAQVSGQGDSLHEHIANLAGSPAIKKGILQTVKVVDELVKVMGRHKPENIVIEMARENQTTQKGQKNSRERMKRIEEGIKELGSEVEFSHEYWMRHALTLAKRARDEREVPVGAVLVLNNRVIGEGWNRAIGLHDPTAHAEIMALRQGGLVMQNYRLIDATLYVTFEPCVMCAGAMIHSRIGRVVFGVRNAKTGAAGSLMDVLHYPGMNHRVEITEGILADECAALLCYFFRMPRQVFNAQKKAQSSTDGLSELDKAGFIKRQLVETRQITKHVAQILDSRMNTKYDENDKLIREVKVITLKSKLVSDFRKDFQFYKVREINNYHHAHDAYLNAVVGTALIKKYPKLESEFVYGDYKVYDVRKMIAKSEQEIGKATAKYFFYSNIMNFFKTEITLANGEIRKRPLIETNGETGEIVWDKGRDFATVRKVLSMPQVNIVKKTEVQTGGFSKESILPKRNSDKLIARKKDWDPKKYGGFDSPTVAYSVLVVAKVEKGKSKKLKSVKELLGITIMERSSFEKNPIDFLEAKGYKEVKKDLIIKLPKYSLFELENGRKRMLASAGELQKGNELALPSKYVNFLYLASHYEKLKGSPEDNEQKQLFVEQHKHYLDEIIEQISEFSKRVILADANLDKVLSAYNKHRDKPIREQAENIIHLFTLTNLGAPAAFKYFDTTIDRKRYTSTKEVLDATLIHQSITGLYETRIDLSQLGGD

SEQ ID NO: 160 - protein, 1554 aa, Artificial Sequence
  Description of Artificial Sequence: Synthetic polypeptide
MDKKYSIGLAIGTNSVGWAVITDEYKVPSKKFKVLGNTDRHSIKKNLIGALLFDSGETAEATRLKRTARRRYTRRKNRICYLQEIFSNEMAKVDDSFFHRLEESFLVEEDKKHERHPIFGNIVDEVAYHEKYPTIYHLRKKLVDSTDKADLRLIYLALAHMIKFRGHFLIEGDLNPDNSDVDKLFIQLVQTYNQLFEENPINASGVDAKAILSARLSKSRRLENLIAQLPGEKKNGLFGNLIALSLGLTPNFKSNFDLAEDAKLQLSKDTYDDDLDNLLAQIGDQYADLFLAAKNLSDAILLSDILRVNTEITKAPLSASMIKRYDEHHQDLTLLKALVRQQLPEKYKEIFFDQSKNGYAGYIDGGASQEEFYKFIKPILEKMDGTEELLVKLNREDLLRKQRTFDNGSIPHQIHLGELHAILRRQEDFYPFLKDNREKIEKILTFRIPYYVGPLARGNSRFAWMTRKSEETITPWNFEEVVDKGASAQSFIERMTNFDKNLPNEKVLPKHSLLYEYFTVYNELTKVKYVTEGMRKPAFLSGEQKKAIVDLLFKTNRKVTVKQLKEDYFKKIECFDSVEISGVEDRFNASLGTYHDLLKIIKDKDFLDNEENEDILEDIVLTLTLFEDREMIEERLKTYAHLFDDKVMKQLKRRRYTGWGRLSRKLINGIRDKQSGKTILDFLKSDGFANRNFMQLIHDDSLTFKEDIQKAQVSGQGDSLHEHIANLAGSPAIKKGILQTVKVVDELVKVMGRHKPENIVIEMARENQTTQKGQKNSRERMKRIEEGIKELGSQILKEHPVENTQLQNEKLYLYYLQNGRDMYVDQELDINRLSDYDVDHIVPQSFLKDDSIDNKVLTRSDKNRGKSDNVPSEEVVKKMKNYWRQLLNAKLITQRKFDNLTKAERGGLSELDKAGFIKRQLVETRQITKHVAQILDSRMNTKYDENDKLIREVKVITLKSKLVSDFRKDFQFYKVREINNYHHAHDAYLNAVVGTALIKKYPKTAHAEIMALRQGGLVMQNYRLIDATLYVTFEPCVMCAGAMIHSRIGRVVFGVRNAKTGAAGSLMDVLHYPGMNHRVEITEGILADECAALLCYFFRMPRQVFNAQKKAQSSTDGSSGSETPGTSESATPESSGSEVEFSHEYWMRHALTLAKRARDEREVPVGAVLVLNNRVIGEGWNRAIGLHDPLESEFVYGDYKVYDVRKMIAKSEQEIGKATAKYFFYSNIMNFFKTEITLANGEIRKRPLIETNGETGEIVWDKGRDFATVRKVLSMPQVNIVKKTEVQTGGFSKESILPKRNSDKLIARKKDWDPKKYGGFDSPTVAYSVLVVAKVEKGKSKKLKSVKELLGITIMERSSFEKNPIDFLEAKGYKEVKKDLIIKLPKYSLFELENGRKRMLASAGELQKGNELALPSKYVNFLYLASHYEKLKGSPEDNEQKQLFVEQHKHYLDEIIEQISEFSKRVILADANLDKVLSAYNKHRDKPIREQAENIIHLFTLTNLGAPAAFKYFDTTIDRKRYTSTKEVLDATLIHQSITGLYETRIDLSQLGGD

SEQ ID NO: 161 - protein, 1554 aa, Artificial Sequence
  Description of Artificial Sequence: Synthetic polypeptide
MDKKYSIGLAIGTNSVGWAVITDEYKVPSKKFKVLGNTDRHSIKKNLIGALLFDSGETAEATRLKRTARRRYTRRKNRICYLQEIFSNEMAKVDDSFFHRLEESFLVEEDKKHERHPIFGNIVDEVAYHEKYPTIYHLRKKLVDSTDKADLRLIYLALAHMIKFRGHFLIEGDLNPDNSDVDKLFIQLVQTYNQLFEENPINASGVDAKAILSARLSKSRRLENLIAQLPGEKKNGLFGNLIALSLGLTPNFKSNFDLAEDAKLQLSKDTYDDDLDNLLAQIGDQYADLFLAAKNLSDAILLSDILRVNTEITKAPLSASMIKRYDEHHQDLTLLKALVRQQLPEKYKEIFFDQSKNGYAGYIDGGASQEEFYKFIKPILEKMDGTEELLVKLNREDLLRKQRTFDNGSIPHQIHLGELHAILRRQEDFYPFLKDNREKIEKILTFRIPYYVGPLARGNSRFAWMTRKSEETITPWNFEEVVDKGASAQSFIERMTNFDKNLPNEKVLPKHSLLYEYFTVYNELTKVKYVTEGMRKPAFLSGEQKKAIVDLLFKTNRKVTVKQLKEDYFKKIECFDSVEISGVEDRFNASLGTYHDLLKIIKDKDFLDNEENEDILEDIVLTLTLFEDREMIEERLKTYAHLFDDKVMKQLKRRRYTGWGRLSRKLINGIRDKQSGKTILDFLKSDGFANRNFMQLIHDDSLTFKEDIQKAQVSGQGDSLHEHIANLAGSPAIKKGILQTVKVVDELVKVMGRHKPENIVIEMARENQTTQKGQKNSRERMKRIEEGIKELGSQILKEHPVENTQLQNEKLYLYYLQNGRDMYVDQELDINRLSDYDVDHIVPQSFLKDDSIDNKVLTRSDKNRGKSDNVPSEEVVKKMKNYWRQLLNAKLITQRKFDNLTKAERGGLSELDKAGFIKRQLVETRQITKHVAQILDSRMNTKYDENDKLIREVKVITLKSKLVSDFRKDFQFYKVREINNYHHAHDAYLNAVVGTALIKKYPKLESEFVYGDYKVTAHAEIMALRQGGLVMQNYRLIDATLYVTFEPCVMCAGAMIHSRIGRVVFGVRNAKTGAAGSLMDVLHYPGMNHRVEITEGILADECAALLCYFFRMPRQVFNAQKKAQSSTDGSSGSETPGTSESATPESSGSEVEFSHEYWMRHALTLAKRARDEREVPVGAVLVLNNRVIGEGWNRAIGLHDPYDVRKMIAKSEQEIGKATAKYFFYSNIMNFFKTEITLANGEIRKRPLIETNGETGEIVWDKGRDFATVRKVLSMPQVNIVKKTEVQTGGFSKESILPKRNSDKLIARKKDWDPKKYGGFDSPTVAYSVLVVAKVEKGKSKKLKSVKELLGITIMERSSFEKNPIDFLEAKGYKEVKKDLIIKLPKYSLFELENGRKRMLASAGELQKGNELALPSKYVNFLYLASHYEKLKGSPEDNEQKQLFVEQHKHYLDEIIEQISEFSKRVILADANLDKVLSAYNKHRDKPIREQAENIIHLFTLTNLGAPAAFKYFDTTIDRKRYTSTKEVLDATLIHQSITGLYETRIDLSQLGGD

SEQ ID NO: 162 - protein, 1554 aa, Artificial Sequence
  Description of Artificial Sequence: Synthetic polypeptide
MDKKYSIGLAIGTNSVGWAVITDEYKVPSKKFKVLGNTDRHSIKKNLIGALLFDSGETAEATRLKRTARRRYTRRKNRICYLQEIFSNEMAKVDDSFFHRLEESFLVEEDKKHERHPIFGNIVDEVAYHEKYPTIYHLRKKLVDSTDKADLRLIYLALAHMIKFRGHFLIEGDLNPDNSDVDKLFIQLVQTYNQLFEENPINASGVDAKAILSARLSKSRRLENLIAQLPGEKKNGLFGNLIALSLGLTPNFKSNFDLAEDAKLQLSKDTYDDDLDNLLAQIGDQYADLFLAAKNLSDAILLSDILRVNTEITKAPLSASMIKRYDEHHQDLTLLKALVRQQLPEKYKEIFFDQSKNGYAGYIDGGASQEEFYKFIKPILEKMDGTEELLVKLNREDLLRKQRTFDNGSIPHQIHLGELHAILRRQEDFYPFLKDNREKIEKILTFRIPYYVGPLARGNSRFAWMTRKSEETITPWNFEEVVDKGASAQSFIERMTNFDKNLPNEKVLPKHSLLYEYFTVYNELTKVKYVTEGMRKPAFLSGEQKKAIVDLLFKTNRKVTVKQLKEDYFKKIECFDSVEISGVEDRFNASLGTYHDLLKIIKDKDFLDNEENEDILEDIVLTLTLFEDREMIEERLKTYAHLFDDKVMKQLKRRRYTGWGRLSRKLINGIRDKQSGKTILDFLKSDGFANRNFMQLIHDDSLTFKEDIQKAQVSGQGDSLHEHIANLAGSPAIKKGILQTVKVVDELVKVMGRHKPENIVIEMARENQTTQKGQKNSRERMKRIEEGIKELGSQILKEHPVENTQLQNEKLYLYYLQNGRDMYVDQELDINRLSDYDVDHIVPQSFLKDDSIDNKVLTRSDKNRGKSDNVPSEEVVKKMKNYWRQLLNAKLITQRKFDNLTKAERGGLSELDKAGFIKRQLVETRQITKHVAQILDSRMNTKYDENDKLIREVKVITLKSKLVSDFRKDFQFYKVREINNYHHAHDAYLNAVVGTALIKKYPKLESEFVYGDYKVYDVRKMITAHAEIMALRQGGLVMQNYRLIDATLYVTFEPCVMCAGAMIHSRIGRVVFGVRNAKTGAAGSLMDVLHYPGMNHRVEITEGILADECAALLCYFFRMPRQVFNAQKKAQSSTDGSSGSETPGTSESATPESSGSEVEFSHEYWMRHALTLAKRARDEREVPVGAVLVLNNRVIGEGWNRAIGLHDPAKSEQEIGKATAKYFFYSNIMNFFKTEITLANGEIRKRPLIETNGETGEIVWDKGRDFATVRKVLSMPQVNIVKKTEVQTGGFSKESILPKRNSDKLIARKKDWDPKKYGGFDSPTVAYSVLVVAKVEKGKSKKLKSVKELLGITIMERSSFEKNPIDFLEAKGYKEVKKDLIIKLPKYSLFELENGRKRMLASAGELQKGNELALPSKYVNFLYLASHYEKLKGSPEDNEQKQLFVEQHKHYLDEIIEQISEFSKRVILADANLDKVLSAYNKHRDKPIREQAENIIHLFTLTNLGAPAAFKYFDTTIDRKRYTSTKEVLDATLIHQSITGLYETRIDLSQLGGD

SEQ ID NO: 163 - protein, 1554 aa, Artificial Sequence
  Description of Artificial Sequence: Synthetic polypeptide
MDKKYSIGLAIGTNSVGWAVITDEYKVPSKKFKVLGNTDRHSIKKNLIGALLFDSGETAEATRLKRTARRRYTRRKNRICYLQEIFSNEMAKVDDSFFHRLEESFLVEEDKKHERHPIFGNIVDEVAYHEKYPTIYHLRKKLVDSTDKADLRLIYLALAHMIKFRGHFLIEGDLNPDNSDVDKLFIQLVQTYNQLFEENPINASGVDAKAILSARLSKSRRLENLIAQLPGEKKNGLFGNLIALSLGLTPNFKSNFDLAEDAKLQLSKDTYDDDLDNLLAQIGDQYADLFLAAKNLSDAILLSDILRVNTEITKAPLSASMIKRYDEHHQDLTLLKALVRQQLPEKYKEIFFDQSKNGYAGYIDGGASQEEFYKFIKPILEKMDGTEELLVKLNREDLLRKQRTFDNGSIPHQIHLGELHAILRRQEDFYPFLKDNREKIEKILTFRIPYYVGPLARGNSRFAWMTRKSEETITPWNFEEVVDKGASAQSFIERMTNFDKNLPNEKVLPKHSLLYEYFTVYNELTKVKYVTEGMRKPAFLSGEQKKAIVDLLFKTNRKVTVKQLKEDYFKKIECFDSVEISGVEDRFNASLGTYHDLLKIIKDKDFLDNEENEDILEDIVLTLTLFEDREMIEERLKTYAHLFDDKVMKQLKRRRYTGWGRLSRKLINGIRDKQSGKTILDFLKSDGFANRNFMQLIHDDSLTFKEDIQKAQVSGQGDSLHEHIANLAGSPAIKKGILQTVKVVDELVKVMGRHKPENIVIEMARENQTTQKGQKNSRERMKRIEEGIKELGSQILKEHPVENTQLQNEKLYLYYLQNGRDMYVDQELDINRLSDYDVDHIVPQSFLKDDSIDNKVLTRSDKNRGKSDNVPSEEVVKKMKNYWRQLLNAKLITQRKFDNLTKAERGGLSELDKAGFIKRQLVETRQITKHVAQILDSRMNTKYDENDKLIREVKVITLKSKLVSDFRKDFQFYKVREINNYHHAHDAYLNAVVGTALIKKYPKLESEFVYGDYKVYDVRKMIAKSEQEITAHAEIMALRQGGLVMQNYRLIDATLYVTFEPCVMCAGAMIHSRIGRVVFGVRNAKTGAAGSLMDVLHYPGMNHRVEITEGILADECAALLCYFFRMPRQVFNAQKKAQSSTDGSSGSETPGTSESATPESSGSEVEFSHEYWMRHALTLAKRARDEREVPVGAVLVLNNRVIGEGWNRAIGLHDPGKATAKYFFYSNIMNFFKTEITLANGEIRKRPLIETNGETGEIVWDKGRDFATVRKVLSMPQVNIVKKTEVQTGGFSKESILPKRNSDKLIARKKDWDPKKYGGFDSPTVAYSVLVVAKVEKGKSKKLKSVKELLGITIMERSSFEKNPIDFLEAKGYKEVKKDLIIKLPKYSLFELENGRKRMLASAGELQKGNELALPSKYVNFLYLASHYEKLKGSPEDNEQKQLFVEQHKHYLDEIIEQISEFSKRVILADANLDKVLSAYNKHRDKPIREQAENIIHLFTLTNLGAPAAFKYFDTTIDRKRYTSTKEVLDATLIHQSITGLYETRIDLSQLGGD

SEQ ID NO: 164 - protein, 1554 aa, Artificial Sequence
  Description of Artificial Sequence: Synthetic polypeptide
MDKKYSIGLAIGTNSVGWAVITDEYKVPSKKFKVLGNTDRHSIKKNLIGALLFDSGETAEATRLKRTARRRYTRRKNRICYLQEIFSNEMAKVDDSFFHRLEESFLVEEDKKHERHPIFGNIVDEVAYHEKYPTIYHLRKKLVDSTDKADLRLIYLALAHMIKFRGHFLIEGDLNPDNSDVDKLFIQLVQTYNQLFEENPINASGVDAKAILSARLSKSRRLENLIAQLPGEKKNGLFGNLIALSLGLTPNFKSNFDLAEDAKLQLSKDTYDDDLDNLLAQIGDQYADLFLAAKNLSDAILLSDILRVNTEITKAPLSASMIKRYDEHHQDLTLLKALVRQQLPEKYKEIFFDQSKNGYAGYIDGGASQEEFYKFIKPILEKMDGTEELLVKLNREDLLRKQRTFDNGSIPHQIHLGELHAILRRQEDFYPFLKDNREKIEKILTFRIPYYVGPLARGNSRFAWMTRKSEETITPWNFEEVVDKGASAQSFIERMTNFDKNLPNEKVLPKHSLLYEYFTVYNELTKVKYVTEGMRKPAFLSGEQKKAIVDLLFKTNRKVTVKQLKEDYFKKIECFDSVEISGVEDRFNASLGTYHDLLKIIKDKDFLDNEENEDILEDIVLTLTLFEDREMIEERLKTYAHLFDDKVMKQLKRRRYTGWGRLSRKLINGIRDKQSGKTILDFLKSDGFANRNFMQLIHDDSLTFKEDIQKAQVSGQGDSLHEHIANLAGSPAIKKGILQTVKVVDELVKVMGRHKPENIVIEMARENQTTQKGQKNSRERMKRIEEGIKELGSQILKEHPVENTQLQNEKLYLYYLQNGRDMYVDQELDINRLSDYDVDHIVPQSFLKDDSIDNKVLTRSDKNRGKSDNVPSEEVVKKMKNYWRQLLNAKLITQRKFDNLTKAERGGLSELDKAGFIKRQLVETRQITKHVAQILDSRMNTKYDENDKLIREVKVITLKSKLVSDFRKDFQFYKVREINNYHHAHDAYLNAVVGTALIKKYPKLESEFVYGDYKVYDVRKMIAKSEQEIGKATAKYFFYSTAHAEIMALRQGGLVMQNYRLIDATLYVTFEPCVMCAGAMIHSRIGRVVFGVRNAKTGAAGSLMDVLHYPGMNHRVEITEGILADECAALLCYFFRMPRQVFNAQKKAQSSTDGSSGSETPGTSESATPESSGSEVEFSHEYWMRHALTLAKRARDEREVPVGAVLVLNNRVIGEGWNRAIGLHDPNIMNFFKTEITLANGEIRKRPLIETNGETGEIVWDKGRDFATVRKVLSMPQVNIVKKTEVQTGGFSKESILPKRNSDKLIARKKDWDPKKYGGFDSPTVAYSVLVVAKVEKGKSKKLKSVKELLGITIMERSSFEKNPIDFLEAKGYKEVKKDLIIKLPKYSLFELENGRKRMLASAGELQKGNELALPSKYVNFLYLASHYEKLKGSPEDNEQKQLFVEQHKHYLDEIIEQISEFSKRVILADANLDKVLSAYNKHRDKPIREQAENIIHLFTLTNLGAPAAFKYFDTTIDRKRYTSTKEVLDATLIHQSITGLYETRIDLSQLGGD

SEQ ID NO: 165 - protein, 1554 aa, Artificial Sequence
  Description of Artificial Sequence: Synthetic polypeptide
MDKKYSIGLAIGTNSVGWAVITDEYKVPSKKFKVLGNTDRHSIKKNLIGALLFDSGETAEATRLKRTARRRYTRRKNRICYLQEIFSNEMAKVDDSFFHRLEESFLVEEDKKHERHPIFGNIVDEVAYHEKYPTIYHLRKKLVDSTDKADLRLIYLALAHMIKFRGHFLIEGDLNPDNSDVDKLFIQLVQTYNQLFEENPINASGVDAKAILSARLSKSRRLENLIAQLPGEKKNGLFGNLIALSLGLTPNFKSNFDLAEDAKLQLSKDTYDDDLDNLLAQIGDQYADLFLAAKNLSDAILLSDILRVNTEITKAPLSASMIKRYDEHHQDLTLLKALVRQQLPEKYKEIFFDQSKNGYAGYIDGGASQEEFYKFIKPILEKMDGTEELLVKLNREDLLRKQRTFDNGSIPHQIHLGELHAILRRQEDFYPFLKDNREKIEKILTFRIPYYVGPLARGNSRFAWMTRKSEETITPWNFEEVVDKGASAQSFIERMTNFDKNLPNEKVLPKHSLLYEYFTVYNELTKVKYVTEGMRKPAFLSGEQKKAIVDLLFKTNRKVTVKQLKEDYFKKIECFDSVEISGVEDRFNASLGTYHDLLKIIKDKDFLDNEENEDILEDIVLTLTLFEDREMIEERLKTYAHLFDDKVMKQLKRRRYTGWGRLSRKLINGIRDKQSGKTILDFLKSDGFANRNFMQLIHDDSLTFKEDIQKAQVSGQGDSLHEHIANLAGSPAIKKGILQTVKVVDELVKVMGRHKPENIVIEMARENQTTQKGQKNSRERMKRIEEGIKELGSQILKEHPVENTQLQNEKLYLYYLQNGRDMYVDQELDINRLSDYDVDHIVPQSFLKDDSIDNKVLTRSDKNRGKSDNVPSEEVVKKMKNYWRQLLNAKLITQRKFDNLTKAERGGLSELDKAGFIKRQLVETRQITKHVAQILDSRMNTKYDENDKLIREVKVITLKSKLVSDFRKDFQFYKVREINNYHHAHDAYLNAVVGTALIKKYPKLESEFVYGDYKVYDVRKMIAKSEQEIGKATAKYFFYSNIMNFFKTEITLANTAHAEIMALRQGGLVMQNYRLIDATLYVTFEPCVMCAGAMIHSRIGRVVFGVRNAKTGAAGSLMDVLHYPGMNHRVEITEGILADECAALLCYFFRMPRQVFNAQKKAQSSTDGSSGSETPGTSESATPESSGSEVEFSHEYWMRHALTLAKRARDEREVPVGAVLVLNNRVIGEGWNRAIGLHDPGEIRKRPLIETNGETGEIVWDKGRDFATVRKVLSMPQVNIVKKTEVQTGGFSKESILPKRNSDKLIARKKDWDPKKYGGFDSPTVAYSVLVVAKVEKGKSKKLKSVKELLGITIMERSSFEKNPIDFLEAKGYKEVKKDLIIKLPKYSLFELENGRKRMLASAGELQKGNELALPSKYVNFLYLASHYEKLKGSPEDNEQKQLFVEQHKHYLDEIIEQISEFSKRVILADANLDKVLSAYNKHRDKPIREQAENIIHLFTLTNLGAPAAFKYFDTTIDRKRYTSTKEVLDATLIHQSITGLYETRIDLSQLGGD

SEQ ID NO: 166 - protein, 1554 aa, Artificial Sequence
  Description of Artificial Sequence: Synthetic polypeptide
MDKKYSIGLAIGTNSVGWAVITDEYKVPSKKFKVLGNTDRHSIKKNLIGALLFDSGETAEATRLKRTARRRYTRRKNRICYLQEIFSNEMAKVDDSFFHRLEESFLVEEDKKHERHPIFGNIVDEVAYHEKYPTIYHLRKKLVDSTDKADLRLIYLALAHMIKFRGHFLIEGDLNPDNSDVDKLFIQLVQTYNQLFEENPINASGVDAKAILSARLSKSRRLENLIAQLPGEKKNGLFGNLIALSLGLTPNFKSNFDLAEDAKLQLSKDTYDDDLDNLLAQIGDQYADLFLAAKNLSDAILLSDILRVNTEITKAPLSASMIKRYDEHHQDLTLLKALVRQQLPEKYKEIFFDQSKNGYAGYIDGGASQEEFYKFIKPILEKMDGTEELLVKLNREDLLRKQRTFDNGSIPHQIHLGELHAILRRQEDFYPFLKDNREKIEKILTFRIPYYVGPLARGNSRFAWMTRKSEETITPWNFEEVVDKGASAQSFIERMTNFDKNLPNEKVLPKHSLLYEYFTVYNELTKVKYVTEGMRKPAFLSGEQKKAIVDLLFKTNRKVTVKQLKEDYFKKIECFDSVEISGVEDRFNASLGTYHDLLKIIKDKDFLDNEENEDILEDIVLTLTLFEDREMIEERLKTYAHLFDDKVMKQLKRRRYTGWGRLSRKLINGIRDKQSGKTILDFLKSDGFANRNFMQLIHDDSLTFKEDIQKAQVSGQGDSLHEHIANLAGSPAIKKGILQTVKVVDELVKVMGRHKPENIVIEMARENQTTQKGQKNSRERMKRIEEGIKELGSQILKEHPVENTQLQNEKLYLYYLQNGRDMYVDQELDINRLSDYDVDHIVPQSFLKDDSIDNKVLTRSDKNRGKSDNVPSEEVVKKMKNYWRQLLNAKLITQRKFDNLTKAERGGLSELDKAGFIKRQLVETRQITKHVAQILDSRMNTKYDENDKLIREVKVITLKSKLVSDFRKDFQFYKVREINNYHHAHDAYLNAVVGTALIKKYPKLESEFVYGDYKVYDVRKMIAKSEQEIGKATAKYFFYSNIMNFFKTEITLANGEIRKRPLIETNGETGEIVWDKGRDFATVRKVLSMPQVNIVKKTEVQTGGFSKESILPKRNSDKLIARKKDWDPKKYGGFDSPTVAYSVLVVAKVEKGKSKKLKSVKELLGITIMERSSFEKNPIDFLEAKGYKEVKKDLIIKLPKYSLFELENGRKRMLASAGELQKGNELALPSKYVNFLYLASHYEKLKGTAHAEIMALRQGGLVMQNYRLIDATLYVTFEPCVMCAGAMIHSRIGRVVFGVRNAKTGAAGSLMDVLHYPGMNHRVEITEGILADECAALLCYFFRMPRQVFNAQKKAQSSTDGSSGSETPGTSESATPESSGSEVEFSHEYWMRHALTLAKRARDEREVPVGAVLVLNNRVIGEGWNRAIGLHDPSPEDNEQKQLFVEQHKHYLDEIIEQISEFSKRVILADANLDKVLSAYNKHRDKPIREQAENIIHLFTLTNLGAPAAFKYFDTTIDRKRYTSTKEVLDATLIHQSITGLYETRIDLSQLGGD

SEQ ID NO: 167 - protein, 178 aa, Escherichia coli
MRRAFITGVFFLSEVEFSHEYWMRHALTLAKRAWDEREVPVGAVLVHNNRVIGEGWNRPIGRHDPTAHAEIMALRQGGLVMQNYRLIDATLYVTLEPCVMCAGAMIHSRIGRVVFGARDAKTGAAGSLMDVLHHPGMNHRVEITEGILADECAALLSDFFRMRRQEIKAQKKAQSSTD

SEQ ID NO: 168 - protein, 167 aa, Escherichia coli; identical to SEQ ID NO: 11

SEQ ID NO: 169 - protein, 208 aa, Petromyzon marinus
MTDAEYVRIHEKLDIYTFKKQFFNNKKSVSHRCYVLFELKRRGERRACFWGYAVNKPQSGTERGIHAEIFSIRKVEEYLRDNPGQFTINWYSSWSPCADCAEKILEWYNQELRGNGHTLKIWACKLYYEKNARNQIGLWNLRDNGVGLNVMVSEHYQCCRKIFIQSSHNQLNENRWLEKTLKRAEKRRSELSIMIQVKILHTTKSPAV

SEQ ID NO: 170 - DNA, 766 bp, Petromyzon marinus
tgacacgacacagccgtgtatatgaggaagggtagctggatggggggggggggaatacgttcagagaggacattagcgagcgtcttgttggtggccttgagtctagacacctgcagacatgaccgacgctgagtacgtgagaatccatgagaagttggacatctacacgtttaagaaacagtttttcaacaacaaaaaatccgtgtcgcatagatgctacgttctctttgaattaaaacgacggggtgaacgtagagcgtgtttttggggctatgctgtgaataaaccacagagcgggacagaacgtggaattcacgccgaaatctttagcattagaaaagtcgaagaatacctgcgcgacaaccccggacaattcacgataaattggtactcatcctggagtccttgtgcagattgcgctgaaaagatcttagaatggtataaccaggagctgcgggggaacggccacactttgaaaatctgggcttgcaaactctattacgagaaaaatgcgaggaatcaaattgggctgtggaacctcagagataacggggttgggttgaatgtaatggtaagtgaacactaccaatgttgcaggaaaatattcatccaatcgtcgcacaatcaattgaatgagaatagatggcttgagaagactttgaagcgagctgaaaaacgacggagcgagttgtccattatgattcaggtaaaaatactccacaccactaagagtcctgctgtttaagaggctatgcggatggttttc

SEQ ID NO: 171 - protein, 145 aa, Homo sapiens
MDSLLMNRRKFLYQFKNVRWAKGRRETYLCYVVKRRDSATSFSLDFGYLRNKNGCHVELLFLRYISDWDLDPGRCYRVTWFTSWSPCYDCARHVADFLRGNPNLSLRIFTARLYFCEDRKAEPEGLRRLHRAGVQIAIMTFKAPV

SEQ ID NO: 172 - DNA, 10681 bp, Homo sapiens
agagaaccatcattaattgaagtgagatttttctggcctgagacttgcagggaggcaagaagacactctggacaccactatggacaggtaaagaggcagtcttctcgtgggtgattgcactggccttcctctcagagcaaatctgagtaatgagactggtagctatccctttctctcatgtaactgtctgactgataagatcagcttgatcaatatgcatatatattttttgatctgtctccttttcttctattcagatcttatacgctgtcagcccaattctttctgtttcagacttctcttgatttccctctttttcatgtggcaaaagaagtagtgcgtacaatgtactgattcgtcctgagatttgtaccatggttgaaactaatttatggtaataatattaacatagcaaatctttagagactcaaatcatgaaaaggtaatagcagtactgtactaaaaacggtagtgctaattttcgtaataattttgtaaatattcaacagtaaaacaacttgaagacacactttcctagggaggcgttactgaaataatttagctatagtaagaaaatttgtaattttagaaatgccaagcattctaaattaattgcttgaaagtcactatgattgtgtccattataaggagacaaattcattcaagcaagttatttaatgttaaaggcccaattgttaggcagttaatggcacttttactattaactaatctttccatttgttcagacgtagcttaacttacctcttaggtgtgaatttggttaaggtcctcataatgtctttatgtgcagtttttgataggttattgtcatagaacttattctattcctacatttatgattactatggatgtatgagaataacacctaatccttatactttacctcaatttaactcctttataaagaacttacattacagaataaagattttttaaaaatatatttttttgtagagacagggtcttagcccagccgaggctggtctctaagtcctggcccaagcgatcctcctgcctgggcctcctaaagtgctggaattatagacatgagccatcacatccaatatacagaataaagatttttaatggaggatttaatgttcttcagaaaattttcttgaggtcagacaatgtcaaatgtctcctcagtttacactgagattttgaaaacaagtctgagctataggtccttgtgaagggtccattggaaatacttgttcaaagtaaaatggaaagcaaaggtaaaatcagcagttgaaattcagagaaagacagaaaaggagaaaagatgaaattcaacaggacagaagggaaatatattatcattaaggaggacagtatctgtagagctcattagtgatggcaaaatgacttggtcaggattatttttaacccgcttgtttctggtttgcacggctggggatgcagctagggttctgcctcagggagcacagctgtccagagcagctgtcagcctgcaagcctgaaacactccctcggtaaagtccttcctactcaggacagaaatgacgagaacagggagctggaaacaggcccctaaccagagaagggaagtaatggatcaacaaagttaactagcaggtcaggatcacgcaattcatttcactctgactggtaacatgtgacagaaacagtgtaggcttattgtattttcatgtagagtaggacccaaaaatccacccaaagtcctttatctatgccacatccttcttatctatacttccaggacactttttcttccttatgataaggctctctctctctccacacacacacacacacacacacacacacacacacacacacacacaaacacacaccccgccaaccaaggtgcatgtaaaaagatgtagattcctctgcctttctcatctacacagcccaggagggtaagttaatataagagggatttattggtaagagatgatgcttaatctgtttaacactgggcctcaaagagagaatttcttttcttctgtacttattaagcacctattatgtgttgagcttatatatacaaagggttattatatgctaatatagtaatagtaatggtggttggtactatggtaattaccataaaaattattatccttttaaaataaagctaattattattggatcttttttagtattcattttatgttttttatgtttttgattttttaaaagacaatctcaccctgttacccaggctggagtgcagtggtgcaatcatagctttctgcagtcttgaactcctgggctcaagcaatcctcctgccttggcctcccaaagtgttgggatacagtcatgagccactgcatctggcctaggatccatttagattaaaatatgcattttaaattttaaaataatatggctaatttttaccttatgtaatgtgtatactggcaataaatctagtttgctgcctaaagtttaaagtgctttccagtaagcttcatgtacgtgaggggagacatttaaagtgaaacagacagccaggtgtggtggctcacgcctgtaatcccagcactctgggaggctgaggtgggtggatcgcttgagccctggagttcaagaccagcctgagcaacatggcaaaacgctgtttctataacaaaaattagccgggcatggtggcatgtgcctgtggtcccagctactagggggctgaggcaggagaatcgttggagcccaggaggtcaaggctgcactgagcagtgcttgcgccactgcactccagcctgggtgacaggaccagaccttgcctcaaaaaaataagaagaaaaattaaaaataaatggaaacaactacaaagagctgttgtcctagatgagctacttagttaggctgatattttggtatttaacttttaaagtcagggtctgtcacctgcactacattattaaaatatcaattctcaatgtatatccacacaaagactggtacgtgaatgttcatagtacctttattcacaaaaccccaaagtagagactatccaaatatccatcaacaagtgaacaaataaacaaaatgtgctatatccatgcaatggaataccaccctgcagtacaaagaagctacttggggatgaatcccaaagtcatgacgctaaatgaaagagtcagacatgaaggaggagataatgtatgccatacgaaattctagaaaatgaaagtaacttatagttacagaaagcaaatcagggcaggcatagaggctcacacctgtaatcccagcactttgagaggccacgtgggaagattgctagaactcaggagttcaagaccagcctgggcaacacagtgaaactccattctccacaaaaatgggaaaaaaagaaagcaaatcagtggttgtcctgtggggaggggaaggactgcaaagagggaagaagctctggtggggtgagggtggtgattcaggttctgtatcctgactgtggtagcagtttggggtgtttacatccaaaaatattcgtagaattatgcatcttaaatgggtggagtttactgtatgtaaattatacctcaatgtaagaaaaaataatgtgtaagaaaactttcaattctcttgccagcaaacgttattcaaattcctgagccctttacttcgcaaattctctgcacttctgccccgtaccattaggtgacagcactagctccacaaattggataaatgcatttctggaaaagactagggacaaaatccaggcatcacttgtgctttcatatcaaccatgctgtacagcttgtgttgctgtctgcagctgcaatggggactcttgatttctttaaggaaacttgggttaccagagtatttccacaaatgctattcaaattagtgcttatgatatgcaagacactgtgctaggagccagaaaacaaagaggaggagaaatcagtcattatgtgggaacaacatagcaagatatttagatcattttgactagttaaaaaagcagcagagtacaaaatcacacatgcaatcagtataatccaaatcatgtaaatatgtgcctgtagaaagactagaggaataaacacaagaatcttaacagtcattgtcattagacactaagtctaattattattattagacactatgatatttgagatttaaaaaatctttaatattttaaaatttagagctcttctatttttccatagtattcaagtttgacaatgatcaagtattactctttctttttttttttttttttttttttttgagatggagttttggtcttgttgcccatgctggagtggaatggcatgaccatagctcactgcaacctccacctcctgggttcaagcaaagctgtcgcctcagcctcccgggtagatgggattacaggcgcccaccaccacactcggctaatgtttgtatttttagtagagatggggtttcaccatgttggccaggctggtctcaaactcctgacctcagaggatccacctgcctcagcctcccaaagtgctgggattacagatgtaggccactgcgcccggccaagtattgctcttatacattaaaaaacaggtgtgagccactgcgcccagccaggtattgctcttatacattaaaaaataggccggtgcagtggctcacgcctgtaatcccagcactttgggaagccaaggcgggcagaacacccgaggtcaggagtccaaggccagcctggccaagatggtgaaaccccgtctctattaaaaatacaaacattacctgggcatgatggtgggcgcctgtaatcccagctactcaggaggctgaggcaggaggatccgcggagcctggcagatctgcctgagcctgggaggttgaggctacagtaagccaagatcatgccagtatacttcagcctgggcgacaaagtgagaccgtaacaaaaaaaaaaaaatttaaaaaaagaaatttagatcaagatccaactgtaaaaagtggcctaaacaccacattaaagagtttggagtttattctgcaggcagaagagaaccatcagggggtcttcagcatgggaatggcatggtgcacctggtttttgtgagatcatggtggtgacagtgtggggaatgttattttggagggactggaggcagacagaccggttaaaaggccagcacaacagataaggaggaagaagatgagggcttggaccgaagcagagaagagcaaacagggaaggtacaaattcaagaaatattggggggtttgaatcaacacatttagatgattaattaaatatgaggactgaggaataagaaatgagtcaaggatggttccaggctgctaggctgcttacctgaggtggcaaagtcgggaggagtggcagtttaggacagggggcagttgaggaatattgttttgatcattttgagtttgaggtacaagttggacacttaggtaaagactggaggggaaatctgaatatacaattatgggactgaggaacaagtttattttattttttgtttcgttttcttgttgaagaacaaatttaattgtaatcccaagtcatcagcatctagaagacagtggcaggaggtgactgtcttgtgggtaagggtttggggtccttgatgagtatctctcaattggccttaaatataagcaggaaaaggagtttatgatggattccaggctcagcagggctcaggagggctcaggcagccagcagaggaagtcagagcatcttctttggtttagcccaagtaatgacttccttaaaaagctgaaggaaaatccagagtgaccagattataaactgtactcttgcattttctctccctcctctcacccacagcctcttgatgaaccggaggaagtttctttaccaattcaaaaatgtccgctgggctaagggtcggcgtgagacctacctgtgctacgtagtgaagaggcgtgacagtgctacatccttttcactggactttggttatcttcgcaataaggtatcaattaaagtcggctttgcaagcagtttaatggtcaactgtgagtgcttttagagccacctgctgatggtattacttccatccttttttggcatttgtgtctctatcacattcctcaaatccttttttttatttctttttccatgtccatgcacccatattagacatggcccaaaatatgtgatttaattcctccccagtaatgctgggcaccctaataccactccttccttcagtgccaagaacaactgctcccaaactgtttaccagctttcctcagcatctgaattgcctttgagattaattaagctaaaagcatttttatatgggagaatattatcagcttgtccaagcaaaaattttaaatgtgaaaaacaaattgtgtcttaagcatttttgaaaattaaggaagaagaatttgggaaaaaattaacggtggctcaattctgtcttccaaatgatttcttttccctcctactcacatgggtcgtaggccagtgaatacattcaacatggtgatccccagaaaactcagagaagcctcggctgatgattaattaaattgatctttcggctacccgagagaattacatttccaagagacttcttcaccaaaatccagatgggtttacataaacttctgcccacgggtatctcctctctcctaacacgctgtgacgtctgggcttggtggaatctcagggaagcatccgtggggtggaaggtcatcgtctggctcgttgtttgatggttatattaccatgcaattttctttgcctacatttgtattgaatacatcccaatctccttcctattcggtgacatgacacattctatttcagaaggctttgattttatcaagcactttcatttacttctcatggcagtgcctattacttctcttacaatacccatctgtctgctttaccaaaatctatttccccttttcagatcctcccaaatggtcctcataaactgtcctgcctccacctagtggtccaggtatatttccacaatgttacatcaacaggcacttctagccattttccttctcaaaaggtgcaaaaagcaacttcataaacacaaattaaatcttcggtgaggtagtgtgatgctgcttcctcccaactcagcgcacttcgtcttcctcattccacaaaaacccatagccttccttcactctgcaggactagtgctgccaagggttcagctctacctactggtgtgctcttttgagcaagttgcttagcctctctgtaacacaaggacaatagctgcaagcatccccaaagatcattgcaggagacaatgactaaggctaccagagccgcaataaaagtcagtgaattttagcgtggtcctctctgtctctccagaacggctgccacgtggaattgctcttcctccgctacatctcggactgggacctagaccctggccgctgctaccgcgtcacctggttcacctcctggagcccctgctacgactgtgcccgacatgtggccgactttctgcgagggaaccccaacctcagtctgaggatcttcaccgcgcgcctctacttctgtgaggaccgcaaggctgagcccgaggggctgcggcggctgcaccgcgccggggtgcaaatagccatcatgaccttcaaaggtgcgaaagggccttccgcgcaggcgcagtgcagcagcccgcattcgggattgcgatgcggaatgaatgagttagtggggaagctcgaggggaagaagtgggcggggattctggttcacctctggagccgaaattaaagattagaagcagagaaaagagtgaatggctcagagacaaggccccgaggaaatgagaaaatggggccagggttgcttctttcccctcgatttggaacctgaactgtcttctacccccatatccccgcctttttttcctttttttttttttgaagattatttttactgctggaatacttttgtagaaaaccacgaaagaactttcaaagcctgggaagggctgcatgaaaattcagttcgtctctccagacagcttcggcgcatccttttggtaaggggcttcctcgctttttaaattttctttctttctctacagtcttttttggagtttcgtatatttcttatattttcttattgttcaatcactctcagttttcatctgatgaaaactttatttctcctccacatcagctttttcttctgctgtttcaccattcagagccctctgctaaggttccttttccctcccttttctttcttttgttgtttcacatctttaaatttctgtctctccccagggttgcgtttccttcctggtcagaattcttttctcctttttttttttttttttttttttttttaaacaaacaaacaaaaaacccaaaaaaactctttcccaatttactttcttccaacatgttacaaagccatccactcagtttagaagactctccggccccaccgacccccaacctcgttttgaagccattcactcaatttgcttctctctttctctacagcccctgtatgaggttgatgacttacgagacgcatttcgtactttgggactttgatagcaacttccaggaatgtcacacacgatgaaatatctctgctgaagacagtggataaaaaacagtccttcaagtcttctctgtttttattcttcaactctcactttcttagagtttacagaaaaaatatttatatacgactctttaaaaagatctatgtcttgaaaatagagaaggaacacaggtctggccagggacgtgctgcaattggtgcagttttgaatgcaacattgtcccctactgggaataacagaactgcaggacctgggagcatcctaaagtgtcaacgtttttctatgacttttaggtaggatgagagcagaaggtagatcctaaaaagcatggtgagaggatcaaatgtttttatatcaacatcctttattatttgattcatttgagttaacagtggtgttagtgatagatttttctattcttttcccttgacgtttactttcaagtaacacaaactcttccatcaggccatgatctataggacctcctaatgagagtatctgggtgattgtgaccccaaaccatctctccaaagcattaatatccaatcatgcgctgtatgttttaatcagcagaagcatgtttttatgtttgtacaaaagaagattgttatgggtggggatggaggtatagaccatgcatggtcaccttcaagctactttaataaaggatcttaaaatgggcaggaggactgtgaacaagacaccctaataatgggttgatgtctgaagtagcaaatcttctggaaacgcaaactcttttaaggaagtccctaatttagaaacacccacaaacttcacatatcataattagcaaacaattggaaggaagttgcttgaatgttggggagaggaaaatctattggctctcgtgggtctcttcatctcagaaatgccaatcaggtcaaggtttgctacattttgtatgtgtgtgatgcttctcccaaaggtatattaactatataagagagttgtgacaaaacagaatgataaagctgcgaaccgtggcacacgctcatagttctagctgcttgggaggttgaggagggaggatggcttgaacacaggtgttcaaggccagcctgggcaacataacaagatcctgtctctcaaaaaaaaaaaaaaaaaaaagaaagagagagggccgggcgtggtggctcacgcctgtaatcccagcactttgggaggccgagccgggcggatcacctgtggtcaggagtttgagaccagcctggccaacatggcaaaaccccgtctgtactcaaaatgcaaaaattagccaggcgtggtagcaggcacctgtaatcccagctacttgggaggctgaggcaggagaatcgcttgaacccaggaggtggaggttgcagtaagctgagatcgtgccgttgcactccagcctgggcgacaagagcaagactctgtctcagaaaaaaaaaaaaaaaagagagagagagagaaagagaacaatatttgggagagaaggatggggaagcattgcaaggaaattgtgctttatccaacaaaatgtaaggagccaataagggatccctatttgtctcttttggtgtctatttgtccctaacaactgtctttgacagtgagaaaaatattcagaataaccatatccctgtgccgttattacctagcaacccttgcaatgaagatgagcagatccacaggaaaacttgaatgcacaactgtcttattttaatcttattgtacataagtttgtaaaagagttaaaaattgttacttcatgtattcatttatattttatattattttgcgtctaatgattttttattaacatgatttccttttctgatatattgaaatggagtctcaaagcttcataaatttataactttagaaatgattctaataacaacgtatgtaattgtaacattgcagtaatggtgctacgaagccatttctcttgatttttagtaaacttttatgacagcaaatttgcttctggctcactttcaatcagttaaataaatgataaataattttggaagctgtgaagataaaataccaaataaaataatataaaagtgatttatatgaagttaaaataaaaaatcagtatgatggaataaacttg

SEQ ID NO: 173 - protein, 198 aa, Homo sapiens [sequence omitted]

SEQ ID NO: 174 - protein, 198 aa, Mus musculus
MDSLLMKQKKFLYHFKNVRWAKGRHETYLCYVVKRRDSATSCSLDFGHLRNKSGCHVELLFLRYISDWDLDPGRCYRVTWFTSWSPCYDCARHVAEFLRWNPNLSLRIFTARLYFCEDRKAEPEGLRRLHRAGVQIGIMTFKDYFYCWNTFVENRERTFKAWEGLHENSVRLTRQLRRILLPLYEVDDLRDAFRMLGF

SEQ ID NO: 175 - protein, 198 aa, Canis lupus
MDSLLMKQRKFLYHFKNVRWAKGRHETYLCYVVKRRDSATSFSLDFGHLRNKSGCHVELLFLRYISDWDLDPGRCYRVTWFTSWSPCYDCARHVADFLRGYPNLSLRIFAARLYFCEDRKAEPEGLRRLHRAGVQIAIMTFKDYFYCWNTFVENREKTFKAWEGLHENSVRLSRQLRRILLPLYEVDDLRDAFRTLGL

SEQ ID NO: 176 - protein, 199 aa, Bos taurus
MDSLLKKQRQFLYQFKNVRWAKGRHETYLCYVVKRRDSPTSFSLDFGHLRNKAGCHVELLFLRYISDWDLDPGRCYRVTWFTSWSPCYDCARHVADFLRGYPNLSLRIFTARLYFCDKERKAEPEGLRRLHRAGVQIAIMTFKDYFYCWNTFVENHERTFKAWEGLHENSVRLSRQLRRILLPLYEVDDLRDAFRTLGL

SEQ ID NO: 177 - protein, 239 aa, Rattus norvegicus
MAVGSKPKAALVGPHWERERIWCFLCSTGLGTQQTGQTSRWLRPAATQDPVSPPRSLLMKQRKFLYHFKNVRWAKGRHETYLCYVVKRRDSATSFSLDFGYLRNKSGCHVELLFLRYISDWDLDPGRCYRVTWFTSWSPCYDCARHVADFLRGNPNLSLRIFTARLTGWGALPAGLMSPARPSDYFYCWNTFVENHERTFKAWEGLHENSVRLSRRLRRILLPLYEVDDLRDAFRTLGL

SEQ ID NO: 178 - protein, 198 aa, Mus musculus [sequence omitted]

SEQ ID NO: 179 - protein, 229 aa, Rattus norvegicus [sequence omitted]

SEQ ID NO: 180 - protein, 229 aa, Mesocricetus auratus
MSSETGPVVVDPTLRRRIEPHEFDAFFDQGELRKETCLLYEIRWGGRHNIWRHTGQNTSRHVEINFIEKFTSERYFYPSTRCSIVWFLSWSPCGECSKAITEFLSGHPNVTLFIYAARLYHHTDQRNRQGLRDLISRGVTIRIMTEQEYCYCWRNFVNYPPSNEVYWPRYPNLWMRLYALELYCIHLGLPPCLKIKRRHQYPLTFFRLNLQSCHYQRIPPHILWATGFI

SEQ ID NO: 181 - protein, 236 aa, Pongo pygmaeus
MTSEKGPSTGDPTLRRRIESWEFDVFYDPRELRKETCLLYEIKWGMSRKIWRSSGKNTTNHVEVNFIKKFTSERRFHSSISCSITWFLSWSPCWECSQAIREFLSQHPGVTLVIYVARLFWHMDQRNRQGLRDLVNSGVTIQIMRASEYYHCWRNFVNYPPGDEAHWPQYPPLWMMLYALELHCIILSLPPCLKISRRWQNHLAFFRLHLQNCHYQTIPPHILLATGLIHPSVTWR

SEQ ID NO: 182 - protein, 236 aa, Oryctolagus cuniculus
MASEKGPSNKDYTLRRRIEPWEFEVFFDPQELRKEACLLYEIKWGASSKTWRSSGKNTTNHVEVNFLEKLTSEGRLGPSTCCSITWFLSWSPCWECSMAIREFLSQHPGVTLIIFVARLFQHMDRRNRQGLKDLVTSGVTVRVMSVSEYCYCWENFVNYPPGKAAQWPRYPPRWMLMYALELYCIILGLPPCLKISRRHQKQLTFFSLTPQYCHYKMIPPYILLATGLLQPSVPWR

SEQ ID NO: 183 - protein, 235 aa, Monodelphis domestica
MNSKTGPSVGDATLRRRIKPWEFVAFFNPQELRKETCLLYEIKWGNQNIWRHSNQNTSQHAEINFMEKFTAERHFNSSVRCSITWFLSWSPCWECSKAIRKFLDHYPNVTLAIFISRLYWHMDQQHRQGLKELVHSGVTIQIMSYSEYHYCWRNFVDYPQGEEDYWPKYPYLWIMLYVLELHCIILGLPPCLKISGSHSNQLALFSLDLQDCHYQKIPYNVLVATGLVQPFVTWR

SEQ ID NO: 184 - protein, 224 aa, Pongo pygmaeus
MAQKEEAAAATEAASQNGEDLENLDDPEKLKELIELPPFEIVTGERLPANFFKFQFRNVEYSSGRNKTFLCYVVEAQGKGGQVQASRGYLEDEHAAAHAEEAFFNTILPAFDPALRYNVTWYVSSSPCAACADRIIKTLSKTKNLRLLILVGRLFMWEELEIQDALKKLKEAGCKLRIMKPQDFEYVWQNFVEQEEGESKAFQPWEDIQENFLYYEEKLADILK

SEQ ID NO: 185 - protein, 224 aa, Bos taurus
MAQKEEAAAAAEPASQNGEEVENLEDPEKLKELIELPPFEIVTGERLPAHYFKFQFRNVEYSSGRNKTFLCYVVEAQSKGGQVQASRGYLEDEHATNHAEEAFFNSIMPTFDPALRYMVTWYVSSSPCAACADRIVKTLNKTKNLRLLILVGRLFMWEEPEIQAALRKLKEAGCRLRIMKPQDFEYIWQNFVEQEEGESKAFEPWEDIQENFLYYEEKLADILK

SEQ ID NO: 186 - protein, 440 aa, Mus musculus
MQPQRLGPRAGMGPFCLGCSHRKCYSPIRNLISQETFKFHFKNLGYAKGRKDTFLCYEVTRKDCDSPVSLHHGVFKNKDNIHAEICFLYWFHDKVLKVLSPREEFKITWYMSWSPCFECAEQIVRFLATHHNLSLDIFSSRLYNVQDPETQQNLCRLVQEGAQVAAMDLYEFKKCWKKFVDNGGRRFRPWKRLLTNFRYQDSKLQEILRPCYISVPSSSSSTLSNICLTKGLPETRFWVEGRRMDPLSEEEFYSQFYNQRVKHLCYYHRMKPYLCYQLEQFNGQAPLKGCLLSEKGKQHAEILFLDKIRSMELSQVTITCYLTWSPCPNCAWQLAAFKRDRPDLILHIYTSRLYFHWKRPFQKGLCSLWQSGILVDVMDLPQFTDCWTNFVNPKRPFWPWKGLEIISRRTQRRLRRIKESWGLQDLVNDFGNLQLGPPMS

SEQ ID NO: 187 - protein, 429 aa, Mus musculus
MGPFCLGCSHRKCYSPIRNLISQETFKFHFKNLGYAKGRKDTFLCYEVTRKDCDSPVSLHHGVFKNKDNIHAEICFLYWFHDKVLKVLSPREEFKITWYMSWSPCFECAEQIVRFLATHHNLSLDIFSSRLYNVQDPETQQNLCRLVQEGAQVAAMDLYEFKKCWKKFVDNGGRRFRPWKRLLTNFRYQDSKLQEILRPCYIPVPSSSSSTLSNICLTKGLPETRFCVEGRRMDPLSEEEFYSQFYNQRVKHLCYYHRMKPYLCYQLEQFNGQAPLKGCLLSEKGKQHAEILFLDKIRSMELSQVTITCYLTWSPCPNCAWQLAAFKRDRPDLILHIYTSRLYFHWKRPFQKGLCSLWQSGILVDVMDLPQFTDCWTNFVNPKRPFWPWKGLEIISRRTQRRLRRIKESWGLQDLVNDFGNLQLGPPMS

SEQ ID NO: 188 - protein, 430 aa, Rattus norvegicus
MGPFCLGCSHRKCYSPIRNLISQETFKFHFKNRLRYAIDRKDTFLCYEVTRKDCDSPVSLHHGVFKNKDNIHAEICFLYWFHDKVLKVLSPREEFKITWYMSWSPCFECAEQVLRFLATHHNLSLDIFSSRLYNIRDPENQQNLCRLVQEGAQVAAMDLYEFKKCWKKFVDNGGRRFRPWKKLLTNFRYQDSKLQEILRPCYIPVPSSSSSTLSNICLTKGLPETRFCVERRRVHLLSEEEFYSQFYNQRVKHLCYYHGVKPYLCYQLEQFNGQAPLKGCLLSEKGKQHAEILFLDKIRSMELSQVIITCYLTWSPCPNCAWQLAAFKRDRPDLILHIYTSRLYFHWKRPFQKGLCSLWQSGILVDVMDLPQFTDCWTNFVNPKRPFWPWKGLEIISRRTQRRLHRIKESWGLQDLVNDFGNLQLGPPMS

SEQ ID NO: 189 - protein, 199 aa, Homo sapiens
MEASPASGPRHLMDPHIFTSNFNNGIGRHKTYLCYEVERLDNGTSVKMDQHRGFLHNQAKNLLCGFYGRHAELRFLDLVPSLQLDPAQIYRVTWFISWSPCFSWGCAGEVRAFLQENTHVRLRIFAARIYDYDPLYKEALQMLRDAGAQVSIMTYDEFKHCWDTFVDHQGCPFQPWDGLDEHSQALSGRLRAILQNQGN

SEQ ID NO: 190 - protein, 373 aa, Homo sapiens
MKPHFRNTVERMYRDTFSYNFYNRPILSRRNTVWLCYEVKTKGPSRPRLDAKIFRGQVYSQPEHHAEMCFLSWFCGNQLPAYKCFQITWFVSWTPCPDCVAKLAEFLAEHPNVTLTISAARLYYYWERDYRRALCRLSQAGARVKIMDDEEFAYCWENFVYSEGQPFMPWYKFDDNYAFLHRTLKEILRNPMEAMYPHIFYFHFKNLRKAYGRNESWLCFTMEVVKHHSPVSWKRGVFRNQVDPETHCHAERCFLSWFCDDILSPNTNYEVTWYTSWSPCPECAGEVAEFLARHSNVNLTIFTARLYYFWDTDYQEGLRSLSQEGASVEIMGYKDFKYCWENFVYNDDEPFKPWKGLKYNFLFLDSKLQEILE

SEQ ID NO: 191 - protein, 370 aa, Macaca mulatta
MVEPMDPRTFVSNFNNRPILSGLNTVWLCCEVKTKDPSGPPLDAKIFQGKVYSKAKYHPEMRFLRWFHKWRQLHHDQEYKVTWYVSWSPCTRCANSVATFLAKDPKVTLTIFVARLYYFWKPDYQQALRILCQKRGGPHATMKIMNYNEFQDCWNKFVDGRGKPFKPRNNLPKHYTLLQATLGELLRHLMDPGTFTSNFNNKPWVSGQHETYLCYKVERLHNDTWVPLNQHRGFLRNQAPNIHGFPKGRHAELCFLDLIPFWKLDGQQYRVTCFTSWSPCFSCAQEMAKFISNNEHVSLCIFAARIYDDQGRYQEGLRALHRDGAKIAMMNYSEFEYCWDTFVDRQGRPFQPWDGLDEHSQALSGRLRAI

SEQ ID NO: 192 - protein, 384 aa, Pan troglodytes
MKPHFRNPVERMYQDTFSDNFYNRPILSHRNTVWLCYEVKTKGPSRPPLDAKIFRGQVYSKLKYHPEMRFFHWFSKWRKLHRDQEYEVTWYISWSPCTKCTRDVATFLAEDPKVTLTIFVARLYYFWDPDYQEALRSLCQKRDGPRATMKIMNYDEFQHCWSKFVYSQRELFEPWNNLPKYYILLHIMLGEILRHSMDPPTFTSNFNNELWVRGRHETYLCYEVERLHNDTWVLLNQRRGFLCNQAPHKHGFLEGRHAELCFLDVIPFWKLDLHQDYRVTCFTSWSPCFSCAQEMAKFISNNKHVSLCIFAARIYDDQGRCQEGLRTLAKAGAKISIMTYSEFKHCWDTFVDHQGCPFQPWDGLEEHSQALSGRLRAILQNQGN

SEQ ID NO: 193 - protein, 377 aa, Chlorocebus sabaeus
MNPQIRNMVEQMEPDIFVYYFNNRPILSGRNTVWLCYEVKTKDPSGPPLDANIFQGKLYPEAKDHPEMKFLHWFRKWRQLHRDQEYEVTWYVSWSPCTRCANSVATFLAEDPKVTLTIFVARLYYFWKPDYQQALRILCQERGGPHATMKIMNYNEFQHCWNEFVDGQGKPFKPRKNLPKHYTLLHATLGELLRHVMDPGTFTSNFNNKPWVSGQRETYLCYKVERSHNDTWVLLNQHRGFLRNQAPDRHGFPKGRHAELCFLDLIPFWKLDDQQYRVTCFTSWSPCFSCAQKMAKFISNNKHVSLCIFAARIYDDQGRCQEGLRTLHRDGAKIAVMNYSEFEYCWDTFVDRQGRPFQPWDGLDEHSQALSGRLRAI

SEQ ID NO: 194 - protein, 384 aa, Homo sapiens
MKPHFRNTVERMYRDTFSYNFYNRPILSRRNTVWLCYEVKTKGPSRPPLDAKIFRGQVYSELKYHPEMRFFHWFSKWRKLHRDQEYEVTWYISWSPCTKCTRDMATFLAEDPKVTLTIFVARLYYFWDPDYQEALRSLCQKRDGPRATMKIMNYDEFQHCWSKFVYSQRELFEPWNNLPKYYILLHIMLGEILRHSMDPPTFTFNFNNEPWVRGRHETYLCYEVERMHNDTWVLLNQRRGFLCNQAPHKHGFLEGRHAELCFLDVIPFWKLDLDQDYRVTCFTSWSPCFSCAQEMAKFISKNKHVSLCIFTARIYDDQGRCQEGLRTLAEAGAKISIMTYSEFKHCWDTFVDHQGCPFQPWDGLDEHSQDLSGRLRAILQNQEN

SEQ ID NO: 195 - protein, 382 aa, Homo sapiens
MNPQIRNPMERMYRDTFYDNFENEPILYGRSYTWLCYEVKIKRGRSNLLWDTGVFRGQVYFKPQYHAEMCFLSWFCGNQLPAYKCFQITWFVSWTPCPDCVAKLAEFLSEHPNVTLTISAARLYYYWERDYRRALCRLSQAGARVTIMDYEEFAYCWENFVYNEGQQFMPWYKFDENYAFLHRTLKEILRYLMDPDTFTFNFNNDPLVLRRRQTYLCYEVERLDNGTWVLMDQHMGFLCNEAKNLLCGFYGRHAELRFLDLVPSLQLDPAQIYRVTWFISWSPCFSWGCAGEVRAFLQENTHVRLRIFAARIYDYDPLYKEALQMLRDAGAQVSIMTYDEFEYCWDTFVYRQGCPFQPWDGLEEHSQALSGRLRAILQNQGN

SEQ ID NO: 196 - protein, 395 aa, Rattus norvegicus
MQPQGLGPNAGMGPVCLGCSHRRPYSPIRNPLKKLYQQTFYFHFKNVRYAWGRKNNFLCYEVNGMDCALPVPLRQGVFRKQGHIHAELCFIYWFHDKVLRVLSPMEEFKVTWYMSWSPCSKCAEQVARFLAAHRNLSLAIFSSRLYYYLRNPNYQQKLCRLIQEGVHVAAMDLPEFKKCWNKFVDNDGQPFRPWMRLRINFSFYDCKLQEIFSRMNLLREDVFYLQFNNSHRVKPVQNRYYRRKSYLCYQLERANGQEPLKGYLLYKKGEQHVEILFLEKMRSMELSQVRITCYLTWSPCPNCARQLAAFKKDHPDLILRIYTSRLYFWRKKFQKGLCTLWRSGIHVDVMDLPQFADCWTNFVNPQRPFRPWNELEKNSWRIQRRLRRIKESWGL

SEQ ID NO: 197 - protein, 226 aa, Bos taurus
DGWEVAFRSGTVLKAGVLGVSMTEGWAGSGHPGQGACVWTPGTRNTMNLLREVLFKQQFGNQPRVPAPYYRRKTYLCYQLKQRNDLTLDRGCFRNKKQRHAERFIDKINSLDLNPSQSYKIICYITWSPCPNCANELVNFITRNNHLKLEIFASRLYFHWIKSFKMGLQDLQNAGISVAVMTHTEFEDCWEQFVDNQSRPFQPWDKLEQYSASIRRRLQRILTAPI

SEQ ID NO: 198 - protein, 490 aa, Pan troglodytes
MNPQIRNPMEWMYQRTFYYNFENEPILYGRSYTWLCYEVKIRRGHSNLLWDTGVFRGQMYSQPEHHAEMCFLSWFCGNQLSAYKCFQITWFVSWTPCPDCVAKLAKFLAEHPNVTLTISAARLYYYWERDYRRALCRLSQAGARVKIMDDEEFAYCWENFVYNEGQPFMPWYKFDDNYAFLHRTLKEIIRHLMDPDTFTFNFNNDPLVLRRHQTYLCYEVERLDNGTWVLMDQHMGFLCNEAKNLLCGFYGRHAELRFLDLVPSLQLDPAQIYRVTWFISWSPCFSWGCAGQVRAFLQENTHVRLRIFAARIYDYDPLYKEALQMLRDAGAQVSIMTYDEFEYCWDTFVYRQGCPFQPWDGLEEHSQALSGRLRAILQVRASSLCMVPHRPPPPPQSPGPCLPLCSEPPLGSLLPTGRPAPSLPFLLTASFSFPPPASLPPLPSLSLSPGHLPVPSFHSLTSCSIQPPCSSRIRETEGWASVSKEGRDLG

SEQ ID NO: 199 - protein, 190 aa, Homo sapiens
MNPQIRNPMKAMYPGTFYFQFKNLWEANDRNETWLCFTVEGIKRRSVVSWKTGVFRNQVDSETHCHAERCFLSWFCDDILSPNTKYQVTWYTSWSPCPDCAGEVAEFLARHSNVNLTIFTARLYYFQYPCYQEGLRSLSQEGVAVEIMDYEDFKYCWENFVYNDNEPFKPWKGLKTNFRLLKRRLRESLQ

SEQ ID NO: 200 - protein, 190 aa, Gorilla gorilla
MNPQIRNPMKAMYPGTFYFQFKNLWEANDRNETWLCFTVEGIKRRSVVSWKTGVFRNQVDSETHCHAERCFLSWECDDILSPNTNYQVTWYTSWSPCPECAGEVAEFLARHSNVNLTIFTARLYYFQDTDYQEGLRSLSQEGVAVKIMDYKDFKYCWENFVYNDDEPFKPWKGLKYNFRFLKRRLQEILE

SEQ ID NO: 201 - protein, 202 aa, Macaca mulatta
MDGSPASRPRHLMDPNTFTFNFNNDLSVRGRHQTYLCYEVERLDNGTWVPMDERRGFLCNKAKNVPCGDYGCHVELRFLCEVPSWQLDPAQTYRVTWFISWSPCFRRGCAGQVRVFLQENKHVRLRIFAARIYDYDPLYQEALRTLRDAGAQVSIMTYEEFKHCWDTFVDRQGRPFQPWDGLDEHSQALSGRLRAILQNQGN

SEQ ID NO: 202 - protein, 185 aa, Bos taurus
MDEYTFTENFNNQGWPSKTYLCYEMERLDGDATIPLDEYKGFVRNKGLDQPEKPCHAELYFLGKIHSWNLDRNQHYRLTCFISWSPCYDCAQKLTTFLKENHHISLHILASRIYTHNRFGCHQSGLCELQAAGARITIMTFEDFKHCWETFVDHKGKPFQPWEGLNVKSQALCTELQAILKTQQN

SEQ ID NO: 203 - protein, 200 aa, Homo sapiens
MALLTAETFRLQFNNKRRLRRPYYPRKALLCYQLTPQNGSTPTRGYFENKKKCHAEICFINEIKSMGLDETQCYQVTCYLTWSPCSSCAWELVDFIKAHDHLNLGIFASRLYYHWCKPQQKGLRLLCGSQVPVEVMGFPKFADCWENFVDHEKPLSFNPYKMLEELDKNSRAIKRRLERIKIPGVRAQGRYMDILCDAEV

SEQ ID NO: 204 - protein, 210 aa, Macaca mulatta
MALLTAKTFSLQFNNKRRVNKPYYPRKALLCYQLTPQNGSTPTRGHLKNKKKDHAEIRFINKIKSMGLDETQCYQVTCYLTWSPCPSCAGELVDFIKAHRHLNLRIFASRLYYHWRPNYQEGLLLLCGSQVPVEVMGLPEFTDCWENFVDHKEPPSFNPSEKLEELDKNSQAIKRRLERIKSRSVDVLENGLRSLQLGPVTPSSSIRNSR

SEQ ID NO: 205 - protein, 386 aa, Homo sapiens
MNPQIRNPMERMYRDTFYDNFENEPILYGRSYTWLCYEVKIKRGRSNLLWDTGVFRGPVLPKRQSNHRQEVYFRFENHAEMCFLSWFCGNRLPANRRFQITWFVSWNPCLPCVVKVTKFLAEHPNVTLTISAARLYYYRDRDWRWVLLRLHKAGARVKIMDYEDFAYCWENFVCNEGQPFMPWYKFDDNYASLHRTLKEILRNPMEAMYPHIFYFHFKNLLKACGRNESWLCFTMEVTKHHSAVFRKRGVFRNQVDPETHCHAERCFLSWFCDDILSPNTNYEVTWYTSWSPCPECAGEVAEFLARHSNVNLTIFTARLCYFWDTDYQEGLCSLSQEGASVKIMGYKDFVSCWKNFVYSDDEPFKPWKGLQTNFRLLKRRLREILQ

SEQ ID NO: 206 - protein, 236 aa, Homo sapiens
MTSEKGPSTGDPTLRRRIEPWEFDVFYDPRELRKEACLLYEIKWGMSRKIWRSSGKNTTNHVEVNFIKKFTSERDFHPSMSCSITWFLSWSPCWECSQAIREFLSRHPGVTLVIYVARLFWHMDQQNRQGLRDLVNSGVTIQIMRASEYYHCWRNFVNYPPGDEAHWPQYPPLWMMLYALELHCIILSLPPCLKISRRWQNHLTFFRLHLQNCHYQTIPPHILLATGLIHPSVAWR

SEQ ID NO: 207 - protein, 229 aa, Mus musculus
MSSETGPVAVDPTLRRRIEPHEFEVFFDPRELRKETCLLYEINWGGRHSVWRHTSQNTSNHVEVNFLEKFTTERYFRPNTRCSITWFLSWSPCGECSRAITEFLSRHPYVTLFIYIARLYHHTDQRNRQGLRDLISSGVTIQIMTEQEYCYCWRNFVNYPPSNEAYWPRYPHLWVKLYVLELYCIILGLPPCLKILRRKQPQLTFFTITLQTCHYQRIPPHLLWATGLK

SEQ ID NO: 208 - protein, 224 aa, Homo sapiens
MAQKEEAAVATEAASQNGEDLENLDDPEKLKELIELPPFEIVTGERLPANFFKFQFRNVEYSSGRNKTFLCYVVEAQGKGGQVQASRGYLEDEHAAAHAEEAFFNTILPAFDPALRYNVTWYVSSSPCAACADRIIKTLSKTKNLRLLILVGRLFMWEEPEIQAALKKLKEAGCKLRIMKPQDFEYVWQNFVEQEEGESKAFQPWEDIQENFLYYEEKLADILK

SEQ ID NO: 209 - protein, 224 aa, Mus musculus
MAQKEEAAEAAAPASQNGDDLENLEDPEKLKELIDLPPFEIVTGVRLPVNFFKFQFRNVEYSSGRNKTFLCYVVEVQSKGGQAQATQGYLEDEHAGAHAEEAFFNTILPAFDPALKYNVTWYVSSSPCAACADRILKTLSKTKNLRLLILVSRLFMWEEPEVQAALKKLKEAGCKLRIMKPQDFEYIWQNFVEQEEGESKAFEPWEDIQENFLYYEEKLADILK

SEQ ID NO: 210 - protein, 224 aa, Rattus norvegicus
MAQKEEAAEAAAPASQNGDDLENLEDPEKLKELIDLPPFEIVTGVRLPVNFFKFQFRNVEYSSGRNKTFLCYVVEAQSKGGQVQATQGYLEDEHAGAHAEEAFFNTILPAFDPALKYNVTWYVSSSPCAACADRILKTLSKTKNLRLLILVSRLFMWEEPEVQAALKKLKEAGCKLRIMKPQDFEYLWQNFVEQEEGESKAFEPWEDIQENFLYYEEKLADILK

SEQ ID NO: 211 - protein, 208 aa, Petromyzon marinus
MTDAEYVRIHEKLDIYTFKKQFFNNKKSVSHRCYVLFELKRRGERRACFWGYAVNKPQSGTERGIHAEIFSIRKVEEYLRDNPGQFTINWYSSWSPCADCAEKILEWYNQELRGNGHTLKIWACKLYYEKNARNQIGLWNLRDNGVGLNVMVSEHYQCCRKIFIQSSHNQLNENRWLEKTLKRAEKRRSELSFMIQVKILHTTKSPAV

SEQ ID NO: 212 - protein, 381 aa, Homo sapiens
MKPHFRNTVERMYRDTFSYNFYNRPILSRRNTVWLCYEVKTKGPSRPPLDAKIFRGQVYSELKYHPEMRFFHWFSKWRKLHRDQEYEVTWYISWSPCTKCTRDMATFLAEDPKVTLTIFVARLYYFWDPDYQEALRSLCQKRDGPRATMKFNYDEFQHCWSKFVYSQRELFEPWNNLPKYYILLHFMLGEILRHSMDPPTFTFNFNNEPWVRGRHETYLCYEVERMHNDTWVLLNQRRGFLCNQAPHKHGFLEGRHAELCFLDVIPFWKLDLDQDYRVTCFTSWSPCFSCAQEMAKFISKKHVSLCIFTARIYRRQGRCQEGLRTLAEAGAKISFTYSEFKHCWDTFVDHQGCPFQPWDGLDEHSQDLSGRLRAILQNQEN

SEQ ID NO: 213 - protein, 182 aa, Homo sapiens
MDPPTFTFNFNNEPWWGRHETYLCYEVERMHNDTWVLLNQRRGFLCNQAPHKHGFLEGRHAELCFLDVIPFWKLDLDQDYRVTCFTSWSPCFSCAQEMAKFISKNKHVSLCIFTARIYDDQGRCQEGLRTLAEAGAKISFTYSEFKHCWDTFVDHQGCPFQPWDGLDEHSQDLSGRLRAILQ

SEQ ID NO: 214 - protein, 184 aa, Homo sapiens
MDPPTFTFNFNNEPWVRGRHETYLCYEVERMHNDTWVLLNQRRGFLCNQAPHKHGFLEGRHAELCFLDVIPFWKLDLDQDYRVTCFTSWSPCFSCAQEMAKFISKNKHVSLCIFTARIYRRQGRCQEGLRTLAEAGAKISFMTYSEFKHCWDTFVDHQGCPFQPWDGLDEHSQDLSGRLRAILQ

SEQ ID NO: 215 - protein, 367 aa, Homo sapiens
MEPIYEEYLANHGTIVKPYYWLSFSLDCSNCPYHIRTGEEARVSLTEFCQIFGFPYGTTFPQTKHLTFYELKTSSGSLVQKGHASSCTGNYIHPESMLFEMNGYLDSAIYNNDSIRHIILYSNNSPCNEANHCCISKMYNFLITYPGITLSIYFSQLYHTEMDFPASAWNREALRSLASLWPRVVLSPISGGIWHSVLHSFISGVSGSHVFQPILTGRALADRHNAYEINAITGVKPYFTDVLLQTKRNPNTKAQEALESYPLNNAFPGQFFQMPSGQLQPNLPPDLRAPVVFVLVPLRDLPPMHMGQNPNKPRNIVRHLNMPQMSFQETKDLGRLPTGRSVEIVEITEQFASSKEADEKKKKKGKK

SEQ ID NO: 216 - protein, 388 aa, Rattus norvegicus
MEPLYEEYLTHSGTIVKPYYWLSVSLNCTNCPYHIRTGEEARVPYTEFHQTFGFPWSTYPQTKHLTFYELRSSSGNLIQKGLASNCTGSHTHPESMLFERDGYLDSLIFHDSNIRHIILYSNNSPCDEANHCCISKMYNFLMNYPEVTLSVFFSQLYHTENQFPTSAWNREALRGLASLWPQVTLSAISGGIWQSILETFVSGISEGLTAVRPFTAGRTLTDRYNAYEINCITEVKPYFTDALHSWQKENQDQKVWAASENQPLHNTTPAQWQPDMSQDCRTPAVFMLVPYRDLPPIHVNPSPQKPRTVVRHLNTLQLSASKVKALRKSPSGRPVKKEEARKGSTRSQEANETNKSKWKKQTLFIKSNICHLLEREQKKIGILSSWSV

SEQ ID NO: 217 - protein, 363 aa, Macaca fascicularis
MEPTYEEYLANHGTIVKPYYWLSFSLDCSNCPYHIRTGEEARVSLTEFCQIFGFPYGTTYPQTKHLTFYELKTSSGSLVQKGHASSCTGNYIHPESMLFEMNGYLDSAIYNNDSIRHIILYCNNSPCNEANHCCISKVYNFLITYPGITLSIYFSQLYHTEMDFPASAWNREALRSLASLWPRVVLSPISGGIWHSVLHSFVSGVSGSHVFQPILTGRALTDRYNAYEINAITGVKPFFTDVLLHTKRNPNTKAQMALESYPLNNAFPGQSFQMTSGIPPDLRAPVVFVLLPLRDLPPMHMGQDPNKPRNIIRHLNMPQMSFQETKDLERLPTRRSVETVEITERFASSKQAEEKTKKKKGKK

SEQ ID NO: 218 - protein, 224 aa, Petromyzon marinus
MAGYECVRVSEKLDFDTFEFQFENLHYATERHRTYVIFDVKPQSAGGRSRRLWGYIINNPNVCHAELILMSMIDRHLESNPGVYAMTWYMSWSPCANCSSKLNPWLKNLLEEQGHTLTMHFSRIYDRDREGDHRGLRGLKHVSNSFRMGVVGRAEVKECLAEYVEASRRTLTWLDTTESMAAKMRRKLFCILVRCAGMRESGIPLHLFTLQTPLLSGRVVWWRV

SEQ ID NO: 219 - protein, 331 aa, Petromyzon marinus
MELREVVDCALASCVRHEPLSRVAFLRCFAAPSQKPRGTVILFYVEGAGRGVTGGHAVNYNKQGTSIHAEVLLLSAVRAALLRRRRCEDGEEATRGCTLHCYSTYSPCRDCVEYIQEFGASTGVRVVIHCCRLYELDVNRRRSEAEGVLRSLSRLGRDFRLMGPRDAIALLLGGRLANTADGESGASGNAWVTETNVVEPLVDMTGFGDEDLHAQVQRNKQIREAYANYASAVSLMLGELHVDPDKFPFLAEFLAQTSVEPSGTPRETRGRPRGASSRGPEIGRQRPADFERALGAYGLFLHPRIVSREADREEIKRDLIVVMRKHNYQGP

SEQ ID NO: 220 - protein, 209 aa, Petromyzon marinus
MAGDENVRVSEKLDFDTFEFQFENLHYATERHRTYVIFDVKPQSAGGRSRRLWGYIINNPNVCHAELILMSMIDRHLESNPGVYAMTWYMSWSPCANCSSKLNPWLKNLLEEQGHTLMMHFSRIYDRDREGDHRGLRGLKHVSNSFRMGVVGRAEVKECLAEYVEASRRTLTWLDTTESMAAKMRRKLFCILVRCAGMRESGMPLHLFT

SEQ ID NO: 221 - protein, 158 aa, Saccharomyces cerevisiae
MVTGGMASKWDQKGMDIAYEEAALGYKEGGVPIGGCLINNKDGSVLGRGHNMRFQKGSATLHGEISTLENCGRLEGKVYKDTTLYTTLSPCDMCTGAIIMYGIPRCVVGENVNFKSKGEKYLQTRGHEVVVVDDERCKKIMKQFIDERPQDWFEDIGE

SEQ ID NO: 222 - protein, 218 aa, Artificial Sequence
  Description of Artificial Sequence: Synthetic polypeptide
MSSETGPVAVDPTLRRRIEPHEFEVFFDPRELRKETCLLYEINWGGRHSIWRHTSQNTNKHVEVNFIEKFTTERYFCPNTRCSITWFLSWSPCGECSRAITEFLSRYPHVTLFIYIARLYHHADPRNRQGLRDLISSGVTIQIMTEQESGYCWRNFVNYSPSNEAHWPRYPHLWVRGLPPCLNILRRKQPQLTFFTIALQSCHYQRLPPHILWATGLK

SEQ ID NO: 223 - protein, 218 aa, Artificial Sequence
  Description of Artificial Sequence: Synthetic polypeptide
MSSETGPVAVDPTLRRRIEPHEFEVFFDPRELRKETCLLYEINWGGRHSIWRHTSQNTNKHVEVNFIEKFTTERYFCPNTRCSITWFLSWSPCGECSRAITEFLSRYPHVTLFIYIARLYHHADPRNRQGLRDLISSGVTIQIMTEQESGYCWRNFVNYSPSNEAHWPRYPHLWVRLYVLELYCIILGLPPCLNILRRKQPQHYQRLPPHILWATGLK

SEQ ID NO: 224 - protein, 8 aa, Artificial Sequence
  Description of Artificial Sequence: Synthetic peptide
SGGSSGGS

SEQ ID NO: 225 - protein, 1609 aa, Artificial Sequence
  Description of Artificial Sequence: Synthetic polypeptide
MSEVEFSHEYWMRHALTLAKRARDEREVPVGAVLVLNNRVIGEGWNRAIGLHDPTAHAEIMALRQGGLVMQNYRLIDATLYVTFEPCVMCAGAMIHSRIGRVVFGVRNAKTGAAGSLMDVLHYPGMNHRVEITEGILADECAALLCTFFRMPRQVFNAQKKAQSSTDSGGSSGGSSGSETPGTSESATPESSGGSSGGSEIGKATAKYFFYSNIMNFFKTEITLANGEIRKRPLIETNGETGEIVWDKGRDFATVRKVLSMPQVNIVKKTEVQTGGFSKESILPKRNSDKLIARKKDWDPKKYGGFMQPTVAYSVLVVAKVEKGKSKKLKSVKELLGITIMERSSFEKNPIDFLEAKGYKEVKKDLIIKLPKYSLFELENGRKRMLASAKFLQKGNELALPSKYVNFLYLASHYEKLKGSPEDNEQKQLFVEQHKHYLDEIIEQISEFSKRVILADANLDKVLSAYNKHRDKPIREQAENIIHLFTLTNLGAPRAFKYFDTTIARKEYRSTKEVLDATLIHQSITGLYETRIDLSQLGGDGGSGGSGGSGGSGGSGGSGGMDKKYSIGLAIGTNSVGWAVITDEYKVPSKKFKVLGNTDRHSIKKNLIGALLFDSGETAEATRLKRTARRRYTRRKNRICYLQEIFSNEMAKVDDSFFHRLEESFLVEEDKKHERHPIFGNIVDEVAYHEKYPTIYHLRKKLVDSTDKADLRLIYLALAHMIKFRGHFLIEGDLNPDNSDVDKLFIQLVQTYNQLFEENPINASGVDAKAILSARLSKSRRLENLIAQLPGEKKNGLFGNLIALSLGLTPNFKSNFDLAEDAKLQLSKDTYDDDLDNLLAQIGDQYADLFLAAKNLSDAILLSDILRVNTEITKAPLSASMIKRYDEHHQDLTLLKALVRQQLPEKYKEIFFDQSKNGYAGYIDGGASQEEFYKFIKPILEKMDGTEELLVKLNREDLLRKQRTFDNGSIPHQIHLGELHAILRRQEDFYPFLKDNREKIEKILTFRIPYYVGPLARGNSRFAWMTRKSEETITPWNFEEVVDKGASAQSFIERMTNFDKNLPNEKVLPKHSLLYEYFTVYNELTKVKYVTEGMRKPAFLSGEQKKAIVDLLFKTNRKVTVKQLKEDYFKKIECFDSVEISGVEDRFNASLGTYHDLLKIIKDKDFLDNEENEDILEDIVLTLTLFEDREMIEERLKTYAHLFDDKVMKQLKRRRYTGWGRLSRKLINGIRDKQSGKTILDFLKSDGFANRNFMQLIHDDSLTFKEDIQKAQVSGQGDSLHEHIANLAGSPAIKKGILQTVKVVDELVKVMGRHKPENIVIEMARENQTTQKGQKNSRERMKRIEEGIKELGSQILKEHPVENTQLQNEKLYLYYLQNGRDMYVDQELDINRLSDYDVDHIVPQSFLKDDSIDNKVLTRSDKNRGKSDNVPSEEVVKKMKNYWRQLLNAKLITQRKFDNLTKAERGGLSELDKAGFIKRQLVETRQITKHVAQILDSRMNTKYDENDKLIREVKVITLKSKLVSDFRKDFQFYKVREINNYHHAHDAYLNAVVGTALIKKYPKLESEFVYGDYKVYDVRKMIAKSEQEGADKRTADGSEFESPKKKRKV

SEQ ID NO: 226 - protein, 1807 aa, Artificial Sequence
  Description of Artificial Sequence: Synthetic polypeptide
MSEVEFSHEYWMRHALTLAKRAWDEREVPVGAVLVHNNRVIGEGWNRPIGRHDPTAHAEIMALRQGGLVMQNYRLIDATLYVTLEPCVMCAGAMIHSRIGRVVFGARDAKTGAAGSLMDVLHHPGMNHRVEITEGILADECAALLSDFFRMRRQEIKAQKKAQSSTDGGSSGGSSGSETPGTSESATPESSGGSSGGSMSEVEFSHEYWMRHALTLAKRARDEREVPVGAVLVLNNRVIGEGWNRAIGLHDPTAHAEIMALRQGGLVMQNYRLIDATLYVTFEPCVMCAGAMIHSRIGRVVFGVRNAKTGAAGSLMDVLHYPGMNHRVEITEGILADECAALLCTFFRMPRQVFNAQKKAQSSTDSGGSSGGSSGSETPGTSESATPESSGGSSGGSEIGKATAKYFFYSNIMNFFKTEITLANGEIRKRPLIETNGETGEIVWDKGRDFATVRKVLSMPQVNIVKKTEVQTGGFSKESILPKRNSDKLIARKKDWDPKKYGGFMQPTVAYSVLVVAKVEKGKSKKLKSVKELLGITIMERSSFEKNPIDFLEAKGYKEVKKDLIIKLPKYSLFELENGRKRMLASAKFLQKGNELALPSKYVNFLYLASHYEKLKGSPEDNEQKQLFVEQHKHYLDEIIEQISEFSKRVILADANLDKVLSAYNKHRDKPIREQAENIIHLFTLTNLGAPRAFKYFDTTIARKEYRSTKEVLDATLIHQSITGLYETRIDLSQLGGDGGSGGSGGSGGSGGSGGSGGMDKKYSIGLAIGTNSVGWAVITDEYKVPSKKFKVLGNTDRHSIKKNLIGALLFDSGETAEATRLKRTARRRYTRRKNRICYLQEIFSNEMAKVDDSFFHRLEESFLVEEDKKHERHPIFGNIVDEVAYHEKYPTIYHLRKKLVDSTDKADLRLIYLALAHMIKFRGHFLIEGDLNPDNSDVDKLFIQLVQTYNQLFEENPINASGVDAKAILSARLSKSRRLENLIAQLPGEKKNGLFGNLIALSLGLTPNFKSNFDLAEDAKLQLSKDTYDDDLDNLLAQIGDQYADLFLAAKNLSDAILLSDILRVNTEITKAPLSASMIKRYDEHHQDLTLLKALVRQQLPEKYKEIFFDQSKNGYAGYIDGGASQEEFYKFIKPILEKMDGTEELLVKLNREDLLRKQRTFDNGSIPHQIHLGELHAILRRQEDFYPFLKDNREKIEKILTFRIPYYVGPLARGNSRFAWMTRKSEETITPWNFEEVVDKGASAQSFIERMTNFDKNLPNEKVLPKHSLLYEYFTVYNELTKVKYVTEGMRKPAFLSGEQKKAIVDLLFKTNRKVTVKQLKEDYFKKIECFDSVEISGVEDRFNASLGTYHDLLKIIKDKDFLDNEENEDILEDIVLTLTLFEDREMIEERLKTYAHLFDDKVMKQLKRRRYTGWGRLSRKLINGIRDKQSGKTILDFLKSDGFANRNFMQLIHDDSLTFKEDIQKAQVSGQGDSLHEHIANLAGSPAIKKGILQTVKVVDELVKVMGRHKPENIVIEMARENQTTQKGQKNSRERMKRIEEGIKELGSQILKEHPVENTQLQNEKLYLYYLQNGRDMYVDQELDINRLSDYDVDHIVPQSFLKDDSIDNKVLTRSDKNRGKSDNVPSEEVVKKMKNYWRQLLNAKLITQRKFDNLTKAERGGLSELDKAGFIKRQLVETRQITKHVAQILDSRMNTKYDENDKLIREVKVITLKSKLVSDFRKDFQFYKVREINNYHHAHDAYLNAVVGTALIKKYPKLESEFVYGDYKVYDVRKMIAKSEQEGADKRTADGSEFESPKKKRKV

SEQ ID NO: 227 - protein, 1588 aa, Artificial Sequence
  Description of Artificial Sequence: Synthetic polypeptide
MSEVEFSHEYWMRHALTLAKRARDEREVPVGAVLVLNNRVIGEGWNRAIGLHDPTAHAEIMALRQGGLVMQNYRLIDATLYVTFEPCVMCAGAMIHSRIGRVVFGVRNAKTGAAGSLMDVLHHPGMNHRVEITEGILADECAALLCRFFRMPRRVFNAQKKAQSSTDSGGSSGGSSGSETPGTSESATPESSGGSSGGSDKKYSIGLAIGTNSVGWAVITDEYKVPSKKFKVLGNTDRHSIKKNLIGALLFDSGETAEATRLKRTARRRYTRRKNRICYLQEIFSNEMAKVDDSFFHRLEESFLVEEDKKHERHPIFGNIVDEVAYHEKYPTIYHLRKKLVDSTDKADLRLIYLALAHMIKFRGHFLIEGDLNPDNSDVDKLFIQLVQTYNQLFEENPINASGVDAKAILSARLSKSRRLENLIAQLPGEKKNGLFGNLIALSLGLTPNFKSNFDLAEDAKLQLSKDTYDDDLDNLLAQIGDQYADLFLAAKNLSDAILLSDILRVNTEITKAPLSASMIKRYDEHHQDLTLLKALVRQQLPEKYKEIFFDQSKNGYAGYIDGGASQEEFYKFIKPILEKMDGTEELLVKLNREDLLRKQRTFDNGSIPHQIHLGELHAILRRQEDFYPFLKDNREKIEKILTFRIPYYVGPLARGNSRFAWMTRKSEETITPWNFEEVVDKGASAQSFIERMTNFDKNLPNEKVLPKHSLLYEYFTVYNELTKVKYVTEGMRKPAFLSGEQKKAIVDLLFKTNRKVTVKQLKEDYFKKIECFDSVEISGVEDRFNASLGTYHDLLKIIKDKDFLDNEENEDILEDIVLTLTLFEDREMIEERLKTYAHLFDDKVMKQLKRRRYTGWGRLSRKLINGIRDKQSGKTILDFLKSDGFANRNFMQLIHDDSLTFKEDIQKAQVSGQGDSLHEHIANLAGSPAIKKGILQTVKVVDELVKVMGRHKPENIVIEMARENQTTQKGQKNSRERMKRIEEGIKELGSQILKEHPVENTQLQNEKLYLYYLQNGRDMYVDQELDINRLSDYDVDHIVPQSFLKDDSIDNKVLTRSDKNRGKSDNVPSEEVVKKMKNYWRQLLNAKLITQRKFDNLTKAERGGLSELDKAGFIKRQLVETRQITKHVAQILDSRMNTKYDENDKLIREVKVITLKSKLVSDFRKDFQFYKVREINNYHHAHDAYLNAVVGTALIKKYPKLESEFVYGDYKVYDVRKMIAKSEQEIGKATAKYFFYSNIMNFFKTEITLANGEIRKRPLIETNGETGEIVWDKGRDFATVRKVLSMPQVNIVKKTEVQTGGFSKESILPKRNSDKLIARKKDWDPKKYGGFDSPTVAYSVLVVAKVEKGKSKKLKSVKELLGITIMERSSFEKNPIDFLEAKGYKEVKKDLIIKLPKYSLFELENGRKRMLASAGELQKGNELALPSKYVNFLYLASHYEKLKGSPEDNEQKQLFVEQHKHYLDEIIEQISEFSKRVILADANLDKVLSAYNKHRDKPIREQAENIIHLFTLTNLGAPAAFKYFDTTIDRKRYTSTKEVLDATLIHQSITGLYETRIDLSQLGGDEGADKRTADGSEFESPKKKRKV

SEQ ID NO: 228 - protein, 1786 aa, Artificial Sequence
  Description of Artificial Sequence: Synthetic polypeptide
MSEVEFSHEYWMRHALTLAKRAWDEREVPVGAVLVHNNRVIGEGWNRPIGRHDPTAHAEIMALRQGGLVMQNYRLIDATLYVTLEPCVMCAGAMIHSRIGRVVFGARDAKTGAAGSLMDVLHHPGMNHRVEITEGILADECAALLSDFFRMRRQEIKAQKKAQSSTDSGGSSGGSSGSETPGTSESATPESSGGSSGGSSEVEFSHEYWMRHALTLAKRARDEREVPVGAVLVLNNRVIGEGWNRAIGLHDPTAHAEIMALRQGGLVMQNYRLIDATLYVTFEPCVMCAGAMIHSRIGRVVFGVRNAKTGAAGSLMDVLHHPGMNHRVEITEGILADECAALLCRFFRMPRRVFNAQKKAQSSTDSGGSSGGSSGSETPGTSESATPESSGGSSGGSDKKYSIGLAIGTNSVGWAVITDEYKVPSKKFKVLGNTDRHSIKKNLIGALLFDSGETAEATRLKRTARRRYTRRKNRICYLQEIFSNEMAKVDDSFFHRLEESFLVEEDKKHERHPIFGNIVDEVAYHEKYPTIYHLRKKLVDSTDKADLRLIYLALAHMIKFRGHFLIEGDLNPDNSDVDKLFIQLVQTYNQLFEENPINASGVDAKAILSARLSKSRRLENLIAQLPGEKKNGLFGNLIALSLGLTPNFKSNFDLAEDAKLQLSKDTYDDDLDNLLAQIGDQYADLFLAAKNLSDAILLSDILRVNTEITKAPLSASMIKRYDEHHQDLTLLKALVRQQLPEKYKEIFFDQSKNGYAGYIDGGASQEEFYKFIKPILEKMDGTEELLVKLNREDLLRKQRTFDNGSIPHQIHLGELHAILRRQEDFYPFLKDNREKIEKILTFRIPYYVGPLARGNSRFAWMTRKSEETITPWNFEEVVDKGASAQSFIERMTNFDKNLPNEKVLPKHSLLYEYFTVYNELTKVKYVTEGMRKPAFLSGEQKKAIVDLLFKTNRKVTVKQLKEDYFKKIECFDSVEISGVEDRFNASLGTYHDLLKIIKDKDFLDNEENEDILEDIVLTLTLFEDREMIEERLKTYAHLFDDKVMKQLKRRRYTGWGRLSRKLINGIRDKQSGKTILDFLKSDGFANRNFMQLIHDDSLTFKEDIQKAQVSGQGDSLHEHIANLAGSPAIKKGILQTVKVVDELVKVMGRHKPENIVIEMARENQTTQKGQKNSRERMKRIEEGIKELGSQILKEHPVENTQLQNEKLYLYYLQNGRDMYVDQELDINRLSDYDVDHIVPQSFLKDDSIDNKVLTRSDKNRGKSDNVPSEEVVKKMKNYWRQLLNAKLITQRKFDNLTKAERGGLSELDKAGFIKRQLVETRQITKHVAQILDSRMNTKYDENDKLIREVKVITLKSKLVSDFRKDFQFYKVREINNYHHAHDAYLNAVVGTALIKKYPKLESEFVYGDYKVYDVRKMIAKSEQEIGKATAKYFFYSNIMNFFKTEITLANGEIRKRPLIETNGETGEIVWDKGRDFATVRKVLSMPQVNIVKKTEVQTGGFSKESILPKRNSDKLIARKKDWDPKKYGGFDSPTVAYSVLVVAKVEKGKSKKLKSVKELLGITIMERSSFEKNPIDFLEAKGYKEVKKDLIIKLPKYSLFELENGRKRMLASAGELQKGNELALPSKYVNFLYLASHYEKLKGSPEDNEQKQLFVEQHKHYLDEIIEQISEFSKRVILADANLDKVLSAYNKHRDKPIREQAENIIHLFTLTNLGAPAAFKYFDTTIDRKRYTSTKEVLDATLIHQSITGLYETRIDLSQLGGDEGADKRTADGSEFESPKKKRKV

SEQ ID NO: 229 - protein, 1588 aa, Artificial Sequence
  Description of Artificial Sequence: Synthetic polypeptide
MSEVEFSHEYWMRHALTLAKRARDEREVPVGAVLVLNNRVIGEGWNRAIGLHDPTAHAEIMALRQGGLVMQNYRLYDATLYVTFEPCVMCAGAMIHSRIGRVVFGVRNAKTGAAGSLMDVLHHPGMNHRVEITEGILADECAALLCRFFRMPRRVFNAQKKAQSSTDSGGSSGGSSGSETPGTSESATPESSGGSSGGSDKKYSIGLAIGTNSVGWAVITDEYKVPSKKFKVLGNTDRHSIKKNLIGALLFDSGETAEATRLKRTARRRYTRRKNRICYLQEIFSNEMAKVDDSFFHRLEESFLVEEDKKHERHPIFGNIVDEVAYHEKYPTIYHLRKKLVDSTDKADLRLIYLALAHMIKFRGHFLIEGDLNPDNSDVDKLFIQLVQTYNQLFEENPINASGVDAKAILSARLSKSRRLENLIAQLPGEKKNGLFGNLIALSLGLTPNFKSNFDLAEDAKLQLSKDTYDDDLDNLLAQIGDQYADLFLAAKNLSDAILLSDILRVNTEITKAPLSASMIKRYDEHHQDLTLLKALVRQQLPEKYKEIFFDQSKNGYAGYIDGGASQEEFYKFIKPILEKMDGTEELLVKLNREDLLRKQRTFDNGSIPHQIHLGELHAILRRQEDFYPFLKDNREKIEKILTFRIPYYVGPLARGNSRFAWMTRKSEETITPWNFEEVVDKGASAQSFIERMTNFDKNLPNEKVLPKHSLLYEYFTVYNELTKVKYVTEGMRKPAFLSGEQKKAIVDLLFKTNRKVTVKQLKEDYFKKIECFDSVEISGVEDRFNASLGTYHDLLKIIKDKDFLDNEENEDILEDIVLTLTLFEDREMIEERLKTYAHLFDDKVMKQLKRRRYTGWGRLSRKLINGIRDKQSGKTILDFLKSDGFANRNFMQLIHDDSLTFKEDIQKAQVSGQGDSLHEHIANLAGSPAIKKGILQTVKVVDELVKVMGRHKPENIVIEMARENQTTQKGQKNSRERMKRIEEGIKELGSQILKEHPVENTQLQNEKLYLYYLQNGRDMYVDQELDINRLSDYDVDHIVPQSFLKDDSIDNKVLTRSDKNRGKSDNVPSEEVVKKMKNYWRQLLNAKLITQRKFDNLTKAERGGLSELDKAGFIKRQLVETRQITKHVAQILDSRMNTKYDENDKLIREVKVITLKSKLVSDFRKDFQFYKVREINNYHHAHDAYLNAVVGTALIKKYPKLESEFVYGDYKVYDVRKMIAKSEQEIGKATAKYFFYSNIMNFFKTEITLANGEIRKRPLIETNGETGEIVWDKGRDFATVRKVLSMPQVNIVKKTEVQTGGFSKESILPKRNSDKLIARKKDWDPKKYGGFDSPTVAYSVLVVAKVEKGKSKKLKSVKELLGITIMERSSFEKNPIDFLEAKGYKEVKKDLIIKLPKYSLFELENGRKRMLASAGELQKGNELALPSKYVNFLYLASHYEKLKGSPEDNEQKQLFVEQHKHYLDEIIEQISEFSKRVILADANLDKVLSAYNKHRDKPIREQAENIIHLFTLTNLGAPAAFKYFDTTIDRKRYTSTKEVLDATLIHQSITGLYETRIDLSQLGGDEGADKRTADGSEFESPKKKRKV

SEQ ID NO: 230 - protein, 1786 aa, Artificial Sequence
  Description of Artificial Sequence: Synthetic polypeptide
MSEVEFSHEYWMRHALTLAKRAWDEREVPVGAVLVHNNRVIGEGWNRPIGRHDPTAHAEIMALRQGGLVMQNYRLIDATLYVTLEPCVMCAGAMIHSRIGRVVFGARDAKTGAAGSLMDVLHHPGMNHRVEITEGILADECAALLSDFFRMRRQEIKAQKKAQSSTDSGGSSGGSSGSETPGTSESATPESSGGSSGGSSEVEFSHEYWMRHALTLAKRARDEREVPVGAVLVLNNRVIGEGWNRAIGLHDPTAHAEIMALRQGGLVMQNYRLYDATLYVTFEPCVMCAGAMIHSRIGRVVFGVRNAKTGAAGSLMDVLHHPGMNHRVEITEGILADECAALLCRFFRMPRRVFNAQKKAQSSTDSGGSSGGSSGSETPGTSESATPESSGGSSGGSDKKYSIGLAIGTNSVGWAVITDEYKVPSKKFKVLGNTDRHSIKKNLIGALLFDSGETAEATRLKRTARRRYTRRKNRICYLQEIFSNEMAKVDDSFFHRLEESFLVEEDKKHERHPIFGNIVDEVAYHEKYPTIYHLRKKLVDSTDKADLRLIYLALAHMIKFRGHFLIEGDLNPDNSDVDKLFIQLVQTYNQLFEENPINASGVDAKAILSARLSKSRRLENLIAQLPGEKKNGLFGNLIALSLGLTPNFKSNFDLAEDAKLQLSKDTYDDDLDNLLAQIGDQYADLFLAAKNLSDAILLSDILRVNTEITKAPLSASMIKRYDEHHQDLTLLKALVRQQLPEKYKEIFFDQSKNGYAGYIDGGASQEEFYKFIKPILEKMDGTEELLVKLNREDLLRKQRTFDNGSIPHQIHLGELHAILRRQEDFYPFLKDNREKIEKILTFRIPYYVGPLARGNSRFAWMTRKSEETITPWNFEEVVDKGASAQSFIERMTNFDKNLPNEKVLPKHSLLYEYFTVYNELTKVKYVTEGMRKPAFLSGEQKKAIVDLLFKTNRKVTVKQLKEDYFKKIECFDSVEISGVEDRFNASLGTYHDLLKIIKDKDFLDNEENEDILEDIVLTLTLFEDREMIEERLKTYAHLFDDKVMKQLKRRRYTGWGRLSRKLINGIRDKQSGKTILDFLKSDGFANRNFMQLIHDDSLTFKEDIQKAQVSGQGDSLHEHIANLAGSPAIKKGILQTVKVVDELVKVMGRHKPENIVIEMARENQTTQKGQKNSRERMKRIEEGIKELGSQILKEHPVENTQLQNEKLYLYYLQNGRDMYVDQELDINRLSDYDVDHIVPQSFLKDDSIDNKVLTRSDKNRGKSDNVPSEEVVKKMKNYWRQLLNAKLITQRKFDNLTKAERGGLSELDKAGFIKRQLVETRQITKHVAQILDSRMNTKYDENDKLIREVKVITLKSKLVSDFRKDFQFYKVREINNYHHAHDAYLNAVVGTALIKKYPKLESEFVYGDYKVYDVRKMIAKSEQEIGKATAKYFFYSNIMNFFKTEITLANGEIRKRPLIETNGETGEIVWDKGRDFATVRKVLSMPQVNIVKKTEVQTGGFSKESILPKRNSDKLIARKKDWDPKKYGGFDSPTVAYSVLVVAKVEKGKSKKLKSVKELLGITIMERSSFEKNPIDFLEAKGYKEVKKDLIIKLPKYSLFELENGRKRMLASAGELQKGNELALPSKYVNFLYLASHYEKLKGSPEDNEQKQLFVEQHKHYLDEIIEQISEFSKRVILADANLDKVLSAYNKHRDKPIREQAENIIHLFTLTNLGAPAAFKYFDTTIDRKRYTSTKEVLDATLIHQSITGLYETRIDLSQLGGDEGADKRTADGSEFESPKKKRKV

SEQ ID NO: 231 - protein, 1588 aa, Artificial Sequence
  Description of Artificial Sequence: Synthetic polypeptide
MSEVEFSHEYWMRHALTLAKRARDEREVPVGAVLVLNNRVIGEGWNRAIGLHDPTAHAEIMALRQGGLVMQNYRLIDATLYSTFEPCVMCAGAMIHSRIGRVVFGVRNAKTGAAGSLMDVLHYPGMNHRVEITEGILADECAALLCYFFRMPRRVFNAQKKAQSSTDSGGSSGGSSGSETPGTSESATPESSGGSSGGSDKKYSIGLAIGTNSVGWAVITDEYKVPSKKFKVLGNTDRHSIKKNLIGALLFDSGETAEATRLKRTARRRYTRRKNRICYLQEIFSNEMAKVDDSFFHRLEESFLVEEDKKHERHPIFGNIVDEVAYHEKYPTIYHLRKKLVDSTDKADLRLIYLALAHMIKFRGHFLIEGDLNPDNSDVDKLFIQLVQTYNQLFEENPINASGVDAKAILSARLSKSRRLENLIAQLPGEKKNGLFGNLIALSLGLTPNFKSNFDLAEDAKLQLSKDTYDDDLDNLLAQIGDQYADLFLAAKNLSDAILLSDILRVNTEITKAPLSASMIKRYDEHHQDLTLLKALVRQQLPEKYKEIFFDQSKNGYAGYIDGGASQEEFYKFIKPILEKMDGTEELLVKLNREDLLRKQRTFDNGSIPHQIHLGELHAILRRQEDFYPFLKDNREKIEKILTFRIPYYVGPLARGNSRFAWMTRKSEETITPWNFEEVVDKGASAQSFIERMTNFDKNLPNEKVLPKHSLLYEYFTVYNELTKVKYVTEGMRKPAFLSGEQKKAIVDLLFKTNRKVTVKQLKEDYFKKIECFDSVEISGVEDRFNASLGTYHDLLKIIKDKDFLDNEENEDILEDIVLTLTLFEDREMIEERLKTYAHLFDDKVMKQLKRRRYTGWGRLSRKLINGIRDKQSGKTILDFLKSDGFANRNFMQLIHDDSLTFKEDIQKAQVSGQGDSLHEHIANLAGSPAIKKGILQTVKVVDELVKVMGRHKPENIVIEMARENQTTQKGQKNSRERMKRIEEGIKELGSQILKEHPVENTQLQNEKLYLYYLQNGRDMYVDQELDINRLSDYDVDHIVPQSFLKDDSIDNKVLTRSDKNRGKSDNVPSEEVVKKMKNYWRQLLNAKLITQRKFDNLTKAERGGLSELDKAGFIKRQLVETRQITKHVAQILDSRMNTKYDENDKLIREVKVITLKSKLVSDFRKDFQFYKVREINNYHHAHDAYLNAVVGTALIKKYPKLESEFVYGDYKVYDVRKMIAKSEQEIGKATAKYFFYSNIMNFFKTEITLANGEIRKRPLIETNGETGEIVWDKGRDFATVRKVLSMPQVNIVKKTEVQTGGFSKESILPKRNSDKLIARKKDWDPKKYGGFDSPTVAYSVLVVAKVEKGKSKKLKSVKELLGITIMERSSFEKNPIDFLEAKGYKEVKKDLIIKLPKYSLFELENGRKRMLASAGELQKGNELALPSKYVNFLYLASHYEKLKGSPEDNEQKQLFVEQHKHYLDEIIEQISEFSKRVILADANLDKVLSAYNKHRDKPIREQAENIIHLFTLTNLGAPAAFKYFDTTIDRKRYTSTKEVLDATLIHQSITGLYETRIDLSQLGGDEGADKRTADGSEFESPKKKRKV

SEQ ID NO: 232 - protein, 1786 aa, Artificial Sequence
  Description of Artificial Sequence: Synthetic polypeptide
MSEVEFSHEYWMRHALTLAKRAWDEREVPVGAVLVHNNRVIGEGWNRPIGRHDPTAHAEIMALRQGGLVMQNYRLIDATLYVTLEPCVMCAGAMIHSRIGRVVFGARDAKTGAAGSLMDVLHHPGMNHRVEITEGILADECAALLSDFFRMRRQEIKAQKKAQSSTDSGGSSGGSSGSETPGTSESATPESSGGSSGGSSEVEFSHEYWMRHALTLAKRARDEREVPVGAVLVLNNRVIGEGWNRAIGLHDPTAHAEIMALRQGGLVMQNYRLIDATLYSTFEPCVMCAGAMIHSRIGRVVFGVRNAKTGAAGSLMDVLHYPGMNHRVEITEGILADECAALLCYFFRMPRRVFNAQKKAQSSTDSGGSSGGSSGSETPGTSESATPESSGGSSGGSDKKYSIGLAIGTNSVGWAVITDEYKVPSKKFKVLGNTDRHSIKKNLIGALLFDSGETAEATRLKRTARRRYTRRKNRICYLQEIFSNEMAKVDDSFFHRLEESFLVEEDKKHERHPIFGNIVDEVAYHEKYPTIYHLRKKLVDSTDKADLRLIYLALAHMIKFRGHFLIEGDLNPDNSDVDKLFIQLVQTYNQLFEENPINASGVDAKAILSARLSKSRRLENLIAQLPGEKKNGLFGNLIALSLGLTPNFKSNFDLAEDAKLQLSKDTYDDDLDNLLAQIGDQYADLFLAAKNLSDAILLSDILRVNTEITKAPLSASMIKRYDEHHQDLTLLKALVRQQLPEKYKEIFFDQSKNGYAGYIDGGASQEEFYKFIKPILEKMDGTEELLVKLNREDLLRKQRTFDNGSIPHQIHLGELHAILRRQEDFYPFLKDNREKIEKILTFRIPYYVGPLARGNSRFAWMTRKSEETITPWNFEEVVDKGASAQSFIERMTNFDKNLPNEKVLPKHSLLYEYFTVYNELTKVKYVTEGMRKPAFLSGEQKKAIVDLLFKTNRKVTVKQLKEDYFKKIECFDSVEISGVEDRFNASLGTYHDLLKIIKDKDFLDNEENEDILEDIVLTLTLFEDREMIEERLKTYAHLFDDKVMKQLKRRRYTGWGRLSRKLINGIRDKQSGKTILDFLKSDGFANRNFMQLIHDDSLTFKEDIQKAQVSGQGDSLHEHIANLAGSPAIKKGILQTVKVVDELVKVMGRHKPENIVIEMARENQTTQKGQKNSRERMKRIEEGIKELGSQILKEHPVENTQLQNEKLYLYYLQNGRDMYVDQELDINRLSDYDVDHIVPQSFLKDDSIDNKVLTRSDKNRGKSDNVPSEEVVKKMKNYWRQLLNAKLITQRKFDNLTKAERGGLSELDKAGFIKRQLVETRQITKHVAQILDSRMNTKYDENDKLIREVKVITLKSKLVSDFRKDFQFYKVREINNYHHAHDAYLNAVVGTALIKKYPKLESEFVYGDYKVYDVRKMIAKSEQEIGKATAKYFFYSNIMNFFKTEITLANGEIRKRPLIETNGETGEIVWDKGRDFATVRKVLSMPQVNIVKKTEVQTGGFSKESILPKRNSDKLIARKKDWDPKKYGGFDSPTVAYSVLVVAKVEKGKSKKLKSVKELLGITIMERSSFEKNPIDFLEAKGYKEVKKDLIIKLPKYSLFELENGRKRMLASAGELQKGNELALPSKYVNFLYLASHYEKLKGSPEDNEQKQLFVEQHKHYLDEIIEQISEFSKRVILADANLDKVLSAYNKHRDKPIREQAENIIHLFTLTNLGAPAAFKYFDTTIDRKRYTSTKEVLDATLIHQSITGLYETRIDLSQLGGDEGADKRTADGSEFESPKKKRKV

SEQ ID NO: 233 - protein, 1588 aa, Artificial Sequence
  Description of Artificial Sequence: Synthetic polypeptide
MSEVEFSHEYWMRHALTLAKRARDEREVPVGAVLVLNNRVIGEGWNRAIGLHDPTAHAEIMALRQGGLVMQNYRLYDATLYSTFEPCVMCAGAMIHSRIGRVVFGVRNAKTGAAGSLMDVLHHPGMNHRVEITEGILADECAALLCRFFRMPRRVFNAQKKAQSSTDSGGSSGGSSGSETPGTSESATPESSGGSSGGSDKKYSIGLAIGTNSVGWAVITDEYKVPSKKFKVLGNTDRHSIKKNLIGALLFDSGETAEATRLKRTARRRYTRRKNRICYLQEIFSNEMAKVDDSFFHRLEESFLVEEDKKHERHPIFGNIVDEVAYHEKYPTIYHLRKKLVDSTDKADLRLIYLALAHMIKFRGHFLIEGDLNPDNSDVDKLFIQLVQTYNQLFEENPINASGVDAKAILSARLSKSRRLENLIAQLPGEKKNGLFGNLIALSLGLTPNFKSNFDLAEDAKLQLSKDTYDDDLDNLLAQIGDQYADLFLAAKNLSDAILLSDILRVNTEITKAPLSASMIKRYDEHHQDLTLLKALVRQQLPEKYKEIFFDQSKNGYAGYIDGGASQEEFYKFIKPILEKMDGTEELLVKLNREDLLRKQRTFDNGSIPHQIHLGELHAILRRQEDFYPFLKDNREKIEKILTFRIPYYVGPLARGNSRFAWMTRKSEETITPWNFEEVVDKGASAQSFIERMTNFDKNLPNEKVLPKHSLLYEYFTVYNELTKVKYVTEGMRKPAFLSGEQKKAIVDLLFKTNRKVTVKQLKEDYFKKIECFDSVEISGVEDRFNASLGTYHDLLKIIKDKDFLDNEENEDILEDIVLTLTLFEDREMIEERLKTYAHLFDDKVMKQLKRRRYTGWGRLSRKLINGIRDKQSGKTILDFLKSDGFANRNFMQLIHDDSLTFKEDIQKAQVSGQGDSLHEHIANLAGSPAIKKGILQTVKVVDELVKVMGRHKPENIVIEMARENQTTQKGQKNSRERMKRIEEGIKELGSQILKEHPVENTQLQNEKLYLYYLQNGRDMYVDQELDINRLSDYDVDHIVPQSFLKDDSIDNKVLTRSDKNRGKSDNVPSEEVVKKMKNYWRQLLNAKLITQRKFDNLTKAERGGLSELDKAGFIKRQLVETRQITKHVAQILDSRMNTKYDENDKLIREVKVITLKSKLVSDFRKDFQFYKVREINNYHHAHDAYLNAVVGTALIKKYPKLESEFVYGDYKVYDVRKMIAKSEQEIGKATAKYFFYSNIMNFFKTEITLANGEIRKRPLIETNGETGEIVWDKGRDFATVRKVLSMPQVNIVKKTEVQTGGFSKESILPKRNSDKLIARKKDWDPKKYGGFDSPTVAYSVLVVAKVEKGKSKKLKSVKELLGITIMERSSFEKNPIDFLEAKGYKEVKKDLIIKLPKYSLFELENGRKRMLASAGELQKGNELALPSKYVNFLYLASHYEKLKGSPEDNEQKQLFVEQHKHYLDEIIEQISEFSKRVILADANLDKVLSAYNKHRDKPIREQAENIIHLFTLTNLGAPAAFKYFDTTIDRKRYTSTKEVLDATLIHQSITGLYETRIDLSQLGGDEGADKRTADGSEFESPKKKRKV

SEQ ID NO: 234 - protein, 1786 aa, Artificial Sequence
  Description of Artificial Sequence: Synthetic polypeptide
MSEVEFSHEYWMRHALTLAKRAWDEREVPVGAVLVHNNRVIGEGWNRPIGRHDPTAHAEIMALRQGGLVMQNYRLIDATLYVTLEPCVMCAGAMIHSRIGRVVFGARDAKTGAAGSLMDVLHHPGMNHRVEITEGILADECAALLSDFFRMRRQEIKAQKKAQSSTDSGGSSGGSSGSETPGTSESATPESSGGSSGGSSEVEFSHEYWMRHALTLAKRARDEREVPVGAVLVLNNRVIGEGWNRAIGLHDPTAHAEIMALRQGGLVMQNYRLYDATLYSTFEPCVMCAGAMIHSRIGRVVFGVRNAKTGAAGSLMDVLHHPGMNHRVEITEGILADECAALLCRFFRMPRRVFNAQKKAQSSTDSGGSSGGSSGSETPGTSESATPESSGGSSGGSDKKYSIGLAIGTNSVGWAVITDEYKVPSKKFKVLGNTDRHSIKKNLIGALLFDSGETAEATRLKRTARRRYTRRKNRICYLQEIFSNEMAKVDDSFFHRLEESFLVEEDKKHERHPIFGNIVDEVAYHEKYPTIYHLRKKLVDSTDKADLRLIYLALAHMIKFRGHFLIEGDLNPDNSDVDKLFIQLVQTYNQLFEENPINASGVDAKAILSARLSKSRRLENLIAQLPGEKKNGLFGNLIALSLGLTPNFKSNFDLAEDAKLQLSKDTYDDDLDNLLAQIGDQYADLFLAAKNLSDAILLSDILRVNTEITKAPLSASMIKRYDEHHQDLTLLKALVRQQLPEKYKEIFFDQSKNGYAGYIDGGASQEEFYKFIKPILEKMDGTEELLVKLNREDLLRKQRTFDNGSIPHQIHLGELHAILRRQEDFYPFLKDNREKIEKILTFRIPYYVGPLARGNSRFAWMTRKSEETITPWNFEEVVDKGASAQSFIERMTNFDKNLPNEKVLPKHSLLYEYFTVYNELTKVKYVTEGMRKPAFLSGEQKKAIVDLLFKTNRKVTVKQLKEDYFKKIECFDSVEISGVEDRFNASLGTYHDLLKIIKDKDFLDNEENEDILEDIVLTLTLFEDREMIEERLKTYAHLFDDKVMKQLKRRRYTGWGRLSRKLINGIRDKQSGKTILDFLKSDGFANRNFMQLIHDDSLTFKEDIQKAQVSGQGDSLHEHIANLAGSPAIKKGILQTVKVVDELVKVMGRHKPENIVIEMARENQTTQKGQKNSRERMKRIEEGIKELGSQILKEHPVENTQLQNEKLYLYYLQNGRDMYVDQELDINRLSDYDVDHIVPQSFLKDDSIDNKVLTRSDKNRGKSDNVPSEEVVKKMKNYWRQLLNAKLITQRKFDNLTKAERGGLSELDKAGFIKRQLVETRQITKHVAQILDSRMNTKYDENDKLIREVKVITLKSKLVSDFRKDFQFYKVREINNYHHAHDAYLNAVVGTALIKKYPKLESEFVYGDYKVYDVRKMIAKSEQEIGKATAKYFFYSNIMNFFKTEITLANGEIRKRPLIETNGETGEIVWDKGRDFATVRKVLSMPQVNIVKKTEVQTGGFSKESILPKRNSDKLIARKKDWDPKKYGGFDSPTVAYSVLVVAKVEKGKSKKLKSVKELLGITIMERSSFEKNPIDFLEAKGYKEVKKDLIIKLPKYSLFELENGRKRMLASAGELQKGNELALPSKYVNFLYLASHYEKLKGSPEDNEQKQLFVEQHKHYLDEIIEQISEFSKRVILADANLDKVLSAYNKHRDKPIREQAENIIHLFTLTNLGAPAAFKYFDTTIDRKRYTSTKEVLDATLIHQSITGLYETRIDLSQLGGDEGADKRTADGSEFESPKKKRKV

SEQ ID NO: 235 - protein, 1588 aa, Artificial Sequence
  Description of Artificial Sequence: Synthetic polypeptide
MSEVEFSHEYWMRHALTLAKRARDEREVPVGAVLVLNNRVIGEGWNRAIGLHDPTAHAEIMALRQGGLVMQNYRLIDATLYVTFEPCVMCAGAMIHSRIGRVVFGVRNAKTGAAGSLMDVLHYPGMNHRVEITEGILADECAALLCTFFRMPRQVFNAQKKAQSSTDSGGSSGGSSGSETPGTSESATPESSGGSSGGSDKKYSIGLAIGTNSVGWAVITDEYKVPSKKFKVLGNTDRHSIKKNLIGALLFDSGETAEATRLKRTARRRYTRRKNRICYLQEIFSNEMAKVDDSFFHRLEESFLVEEDKKHERHPIFGNIVDEVAYHEKYPTIYHLRKKLVDSTDKADLRLIYLALAHMIKFRGHFLIEGDLNPDNSDVDKLFIQLVQTYNQLFEENPINASGVDAKAILSARLSKSRRLENLIAQLPGEKKNGLFGNLIALSLGLTPNFKSNFDLAEDAKLQLSKDTYDDDLDNLLAQIGDQYADLFLAAKNLSDAILLSDILRVNTEITKAPLSASMIKRYDEHHQDLTLLKALVRQQLPEKYKEIFFDQSKNGYAGYIDGGASQEEFYKFIKPILEKMDGTEELLVKLNREDLLRKQRTFDNGSIPHQIHLGELHAILRRQEDFYPFLKDNREKIEKILTFRIPYYVGPLARGNSRFAWMTRKSEETITPWNFEEVVDKGASAQSFIERMTNFDKNLPNEKVLPKHSLLYEYFTVYNELTKVKYVTEGMRKPAFLSGEQKKAIVDLLFKTNRKVTVKQLKEDYFKKIECFDSVEISGVEDRFNASLGTYHDLLKIIKDKDFLDNEENEDILEDIVLTLTLFEDREMIEERLKTYAHLFDDKVMKQLKRRRYTGWGRLSRKLINGIRDKQSGKTILDFLKSDGFANRNFMQLIHDDSLTFKEDIQKAQVSGQGDSLHEHIANLAGSPAIKKGILQTVKVVDELVKVMGRHKPENIVIEMARENQTTQKGQKNSRERMKRIEEGIKELGSQILKEHPVENTQLQNEKLYLYYLQNGRDMYVDQELDINRLSDYDVDHIVPQSFLKDDSIDNKVLTRSDKNRGKSDNVPSEEVVKKMKNYWRQLLNAKLITQRKFDNLTKAERGGLSELDKAGFIKRQLVETRQITKHVAQILDSRMNTKYDENDKLIREVKVITLKSKLVSDFRKDFQFYKVREINNYHHAHDAYLNAVVGTALIKKYPKLESEFVYGDYKVYDVRKMIAKSEQEIGKATAKYFFYSNIMNFFKTEITLANGEIRKRPLIETNGETGEIVWDKGRDFATVRKVLSMPQVNIVKKTEVQTGGFSKESILPKRNSDKLIARKKDWDPKKYGGFVSPTVAYSVLVVAKVEKGKSKKLKSVKELLGITIMERSSFEKNPIDFLEAKGYKEVKKDLIIKLPKYSLFELENGRKRMLASARELQKGNELALPSKYVNFLYLASHYEKLKGSPEDNEQKQLFVEQHKHYLDEIIEQISEFSKRVILADANLDKVLSAYNKHRDKPIREQAENIIHLFTLTNLGAPAAFKYFDTTIDRKQYRSTKEVLDATLIHQSITGLYETRIDLSQLGGDEGADKRTADGSEFESPKKKRKV

SEQ ID NO: 236 - protein, 1588 aa, Artificial Sequence
  Description of Artificial Sequence: Synthetic polypeptide
MSEVEFSHEYWMRHALTLAKRARDEREVPVGAVLVLNNRVIGEGWNRAIGLHDPTAHAEIMALRQGGLVMQNYRLIDATLYVTFEPCVMCAGAMIHSRIGRVVFGVRNAKTGAAGSLMDVLHYPGMNHRVEITEGILADECAALLCRFFRMPRQVFNAQKKAQSSTDSGGSSGGSSGSETPGTSESATPESSGGSSGGSDKKYSIGLAIGTNSVGWAVITDEYKVPSKKFKVLGNTDRHSIKKNLIGALLFDSGETAEATRLKRTARRRYTRRKNRICYLQEIFSNEMAKVDDSFFHRLEESFLVEEDKKHERHPIFGNIVDEVAYHEKYPTIYHLRKKLVDSTDKADLRLIYLALAHMIKFRGHFLIEGDLNPDNSDVDKLFIQLVQTYNQLFEENPINASGVDAKAILSARLSKSRRLENLIAQLPGEKKNGLFGNLIALSLGLTPNFKSNFDLAEDAKLQLSKDTYDDDLDNLLAQIGDQYADLFLAAKNLSDAILLSDILRVNTEITKAPLSASMIKRYDEHHQDLTLLKALVRQQLPEKYKEIFFDQSKNGYAGYIDGGASQEEFYKFIKPILEKMDGTEELLVKLNREDLLRKQRTFDNGSIPHQIHLGELHAILRRQEDFYPFLKDNREKIEKILTFRIPYYVGPLARGNSRFAWMTRKSEETITPWNFEEVVDKGASAQSFIERMTNFDKNLPNEKVLPKHSLLYEYFTVYNELTKVKYVTEGMRKPAFLSGEQKKAIVDLLFKTNRKVTVKQLKEDYFKKIECFDSVEISGVEDRFNASLGTYHDLLKIIKDKDFLDNEENEDILEDIVLTLTLFEDREMIEERLKTYAHLFDDKVMKQLKRRRYTGWGRLSRKLINGIRDKQSGKTILDFLKSDGFANRNFMQLIHDDSLTFKEDIQKAQVSGQGDSLHEHIANLAGSPAIKKGILQTVKVVDELVKVMGRHKPENIVIEMARENQTTQKGQKNSRERMKRIEEGIKELGSQILKEHPVENTQLQNEKLYLYYLQNGRDMYVDQELDINRLSDYDVDHIVPQSFLKDDSIDNKVLTRSDKNRGKSDNVPSEEVVKKMKNYWRQLLNAKLITQRKFDNLTKAERGGLSELDKAGFIKRQLVETRQITKHVAQILDSRMNTKYDENDKLIREVKVITLKSKLVSDFRKDFQFYKVREINNYHHAHDAYLNAVVGTALIKKYPKLESEFVYGDYKVYDVRKMIAKSEQEIGKATAKYFFYSNIMNFFKTEITLANGEIRKRPLIETNGETGEIVWDKGRDFATVRKVLSMPQVNIVKKTEVQTGGFSKESILPKRNSDKLIARKKDWDPKKYGGFVSPTVAYSVLVVAKVEKGKSKKLKSVKELLGITIMERSSFEKNPIDFLEAKGYKEVKKDLIIKLPKYSLFELENGRKRMLASARELQKGNELALPSKYVNFLYLASHYEKLKGSPEDNEQKQLFVEQHKHYLDEIIEQISEFSKRVILADANLDKVLSAYNKHRDKPIREQAENIIHLFTLTNLGAPAAFKYFDTTIDRKQYRSTKEVLDATLIHQSITGLYETRIDLSQLGGDEGADKRTADGSEFESPKKKRKV

SEQ ID NO: 237 - protein, 1588 aa, Artificial Sequence
  Description of Artificial Sequence: Synthetic polypeptide
MSEVEFSHEYWMRHALTLAKRARDEREVPVGAVLVLNNRVIGEGWNRAIGLHDPTAHAEIMALRQGGLVMQNYRLIDATLYVTFEPCVMCAGAMIHSRIGRVVFGVRNAKTGAAGSLMDVLHYPGMNHRVEITEGILADECAALLCYFFRMPRSVFNAQKKAQSSTDSGGSSGGSSGSETPGTSESATPESSGGSSGGSDKKYSIGLAIGTNSVGWAVITDEYKVPSKKFKVLGNTDRHSIKKNLIGALLFDSGETAEATRLKRTARRRYTRRKNRICYLQEIFSNEMAKVDDSFFHRLEESFLVEEDKKHERHPIFGNIVDEVAYHEKYPTIYHLRKKLVDSTDKADLRLIYLALAHMIKFRGHFLIEGDLNPDNSDVDKLFIQLVQTYNQLFEENPINASGVDAKAILSARLSKSRRLENLIAQLPGEKKNGLFGNLIALSLGLTPNFKSNFDLAEDAKLQLSKDTYDDDLDNLLAQIGDQYADLFLAAKNLSDAILLSDILRVNTEITKAPLSASMIKRYDEHHQDLTLLKALVRQQLPEKYKEIFFDQSKNGYAGYIDGGASQEEFYKFIKPILEKMDGTEELLVKLNREDLLRKQRTFDNGSIPHQIHLGELHAILRRQEDFYPFLKDNREKIEKILTFRIPYYVGPLARGNSRFAWMTRKSEETITPWNFEEVVDKGASAQSFIERMTNFDKNLPNEKVLPKHSLLYEYFTVYNELTKVKYVTEGMRKPAFLSGEQKKAIVDLLFKTNRKVTVKQLKEDYFKKIECFDSVEISGVEDRFNASLGTYHDLLKIIKDKDFLDNEENEDILEDIVLTLTLFEDREMIEERLKTYAHLFDDKVMKQLKRRRYTGWGRLSRKLINGIRDKQSGKTILDFLKSDGFANRNFMQLIHDDSLTFKEDIQKAQVSGQGDSLHEHIANLAGSPAIKKGILQTVKVVDELVKVMGRHKPENIVIEMARENQTTQKGQKNSRERMKRIEEGIKELGSQILKEHPVENTQLQNEKLYLYYLQNGRDMYVDQELDINRLSDYDVDHIVPQSFLKDDSIDNKVLTRSDKNRGKSDNVPSEEVVKKMKNYWRQLLNAKLITQRKFDNLTKAERGGLSELDKAGFIKRQLVETRQITKHVAQILDSRMNTKYDENDKLIREVKVITLKSKLVSDFRKDFQFYKVREINNYHHAHDAYLNAVVGTALIKKYPKLESEFVYGDYKVYDVRKMIAKSEQEIGKATAKYFFYSNIMNFFKTEITLANGEIRKRPLIETNGETGEIVWDKGRDFATVRKVLSMPQVNIVKKTEVQTGGFSKESILPKRNSDKLIARKKDWDPKKYGGFVSPTVAYSVLVVAKVEKGKSKKLKSVKELLGITIMERSSFEKNPIDFLEAKGYKEVKKDLIIKLPKYSLFELENGRKRMLASARELQKGNELALPSKYVNFLYLASHYEKLKGSPEDNEQKQLFVEQHKHYLDEIIEQISEFSKRVILADANLDKVLSAYNKHRDKPIREQAENIIHLFTLTNLGAPAAFKYFDTTIDRKQYRSTKEVLDATLIHQSITGLYETRIDLSQLGGDEGADKRTADGSEFESPKKKRKV

SEQ ID NO: 238 - protein, 1588 aa, Artificial Sequence
  Description of Artificial Sequence: Synthetic polypeptide
MSEVEFSHEYWMRHALTLAKRARDEREVPVGAVLVLNNRVIGEGWNRAIGLHDPTAHAEIMALRQGGLVMQNYRLIDATLYVTFEPCVMCAGAMIHSRIGRVVFGVRNAKTGAAGSLMDVLHHPGMNHRVEITEGILADECAALLCYFFRMPRQVFNAQKKAQSSTDSGGSSGGSSGSETPGTSESATPESSGGSSGGSDKKYSIGLAIGTNSVGWAVITDEYKVPSKKFKVLGNTDRHSIKKNLIGALLFDSGETAEATRLKRTARRRYTRRKNRICYLQEIFSNEMAKVDDSFFHRLEESFLVEEDKKHERHPIFGNIVDEVAYHEKYPTIYHLRKKLVDSTDKADLRLIYLALAHMIKFRGHFLIEGDLNPDNSDVDKLFIQLVQTYNQLFEENPINASGVDAKAILSARLSKSRRLENLIAQLPGEKKNGLFGNLIALSLGLTPNFKSNFDLAEDAKLQLSKDTYDDDLDNLLAQIGDQYADLFLAAKNLSDAILLSDILRVNTEITKAPLSASMIKRYDEHHQDLTLLKALVRQQLPEKYKEIFFDQSKNGYAGYIDGGASQEEFYKFIKPILEKMDGTEELLVKLNREDLLRKQRTFDNGSIPHQIHLGELHAILRRQEDFYPFLKDNREKIEKILTFRIPYYVGPLARGNSRFAWMTRKSEETITPWNFEEVVDKGASAQSFIERMTNFDKNLPNEKVLPKHSLLYEYFTVYNELTKVKYVTEGMRKPAFLSGEQKKAIVDLLFKTNRKVTVKQLKEDYFKKIECFDSVEISGVEDRFNASLGTYHDLLKIIKDKDFLDNEENEDILEDIVLTLTLFEDREMIEERLKTYAHLFDDKVMKQLKRRRYTGWGRLSRKLINGIRDKQSGKTILDFLKSDGFANRNFMQLIHDDSLTFKEDIQKAQVSGQGDSLHEHIANLAGSPAIKKGILQTVKVVDELVKVMGRHKPENIVIEMARENQTTQKGQKNSRERMKRIEEGIKELGSQILKEHPVENTQLQNEKLYLYYLQNGRDMYVDQELDINRLSDYDVDHIVPQSFLKDDSIDNKVLTRSDKNRGKSDNVPSEEVVKKMKNYWRQLLNAKLITQRKFDNLTKAERGGLSELDKAGFIKRQLVETRQITKHVAQILDSRMNTKYDENDKLIREVKVITLKSKLVSDFRKDFQFYKVREINNYHHAHDAYLNAVVGTALIKKYPKLESEFVYGDYKVYDVRKMIAKSEQEIGKATAKYFFYSNIMNFFKTEITLANGEIRKRPLIETNGETGEIVWDKGRDFATVRKVLSMPQVNIVKKTEVQTGGFSKESILPKRNSDKLIARKKDWDPKKYGGFVSPTVAYSVLVVAKVEKGKSKKLKSVKELLGITIMERSSFEKNPIDFLEAKGYKEVKKDLIIKLPKYSLFELENGRKRMLASARELQKGNELALPSKYVNFLYLASHYEKLKGSPEDNEQKQLFVEQHKHYLDEIIEQISEFSKRVILADANLDKVLSAYNKHRDKPIREQAENIIHLFTLTNLGAPAAFKYFDTTIDRKQYRSTKEVLDATLIHQSITGLYETRIDLSQLGGDEGADKRTADGSEFESPKKKRKV

SEQ ID NO: 239 - protein, 1588 aa, Artificial Sequence
  Description of Artificial Sequence: Synthetic polypeptide
MSEVEFSHEYWMRHALTLAKRARDEREVPVGAVLVLNNRVIGEGWNRAIGLHDPTAHAEIMALRQGGLVMQNYRLIDATLYSTFEPCVMCAGAMIHSRIGRVVFGVRNAKTGAAGSLMDVLHYPGMNHRVEITEGILADECAALLCYFFRMPRQVFNAQKKAQSSTDSGGSSGGSSGSETPGTSESATPESSGGSSGGSDKKYSIGLAIGTNSVGWAVITDEYKVPSKKFKVLGNTDRHSIKKNLIGALLFDSGETAEATRLKRTARRRYTRRKNRICYLQEIFSNEMAKVDDSFFHRLEESFLVEEDKKHERHPIFGNIVDEVAYHEKYPTIYHLRKKLVDSTDKADLRLIYLALAHMIKFRGHFLIEGDLNPDNSDVDKLFIQLVQTYNQLFEENPINASGVDAKAILSARLSKSRRLENLIAQLPGEKKNGLFGNLIALSLGLTPNFKSNFDLAEDAKLQLSKDTYDDDLDNLLAQIGDQYADLFLAAKNLSDAILLSDILRVNTEITKAPLSASMIKRYDEHHQDLTLLKALVRQQLPEKYKEIFFDQSKNGYAGYIDGGASQEEFYKFIKPILEKMDGTEELLVKLNREDLLRKQRTFDNGSIPHQIHLGELHAILRRQEDFYPFLKDNREKIEKILTFRIPYYVGPLARGNSRFAWMTRKSEETITPWNFEEVVDKGASAQSFIERMTNFDKNLPNEKVLPKHSLLYEYFTVYNELTKVKYVTEGMRKPAFLSGEQKKAIVDLLFKTNRKVTVKQLKEDYFKKIECFDSVEISGVEDRFNASLGTYHDLLKIIKDKDFLDNEENEDILEDIVLTLTLFEDREMIEERLKTYAHLFDDKVMKQLKRRRYTGWGRLSRKLINGIRDKQSGKTILDFLKSDGFANRNFMQLIHDDSLTFKEDIQKAQVSGQGDSLHEHIANLAGSPAIKKGILQTVKVVDELVKVMGRHKPENIVIEMARENQTTQKGQKNSRERMKRIEEGIKELGSQILKEHPVENTQLQNEKLYLYYLQNGRDMYVDQELDINRLSDYDVDHIVPQSFLKDDSIDNKVLTRSDKNRGKSDNVPSEEVVKKMKNYWRQLLNAKLITQRKFDNLTKAERGGLSELDKAGFIKRQLVETRQITKHVAQILDSRMNTKYDENDKLIREVKVITLKSKLVSDFRKDFQFYKVREINNYHHAHDAYLNAVVGTALIKKYPKLESEFVYGDYKVYDVRKMIAKSEQEIGKATAKYFFYSNIMNFFKTEITLANGEIRKRPLIETNGETGEIVWDKGRDFATVRKVLSMPQVNIVKKTEVQTGGFSKESILPKRNSDKLIARKKDWDPKKYGGFVSPTVAYSVLVVAKVEKGKSKKLKSVKELLGITIMERSSFEKNPIDFLEAKGYKEVKKDLIIKLPKYSLFELENGRKRMLASARELQKGNELALPSKYVNFLYLASHYEKLKGSPEDNEQKQLFVEQHKHYLDEIIEQISEFSKRVILADANLDKVLSAYNKHRDKPIREQAENIIHLFTLTNLGAPAAFKYFDTTIDRKQYRSTKEVLDATLIHQSITGLYETRIDLSQLGGDEGADKRTADGSEFESPKKKRKV

SEQ ID NO: 240 - protein, 1588 aa, Artificial Sequence
  Description of Artificial Sequence: Synthetic polypeptide
MSEVEFSHEYWMRHALTLAKRARDEREVPVGAVLVLNNRVIGEGWNRAIGLHDPTAHAEIMALRQGGLVMQNYRLIDATLYVTFEPCVMCAGAMIHSRIGRVVFGVRNAKTGAAGSLMDVLHYPGMNHRVEITEGILADECAALLCYFFRMPRQVFNAQKKAQSSRDSGGSSGGSSGSETPGTSESATPESSGGSSGGSDKKYSIGLAIGTNSVGWAVITDEYKVPSKKFKVLGNTDRHSIKKNLIGALLFDSGETAEATRLKRTARRRYTRRKNRICYLQEIFSNEMAKVDDSFFHRLEESFLVEEDKKHERHPIFGNIVDEVAYHEKYPTIYHLRKKLVDSTDKADLRLIYLALAHMIKFRGHFLIEGDLNPDNSDVDKLFIQLVQTYNQLFEENPINASGVDAKAILSARLSKSRRLENLIAQLPGEKKNGLFGNLIALSLGLTPNFKSNFDLAEDAKLQLSKDTYDDDLDNLLAQIGDQYADLFLAAKNLSDAILLSDILRVNTEITKAPLSASMIKRYDEHHQDLTLLKALVRQQLPEKYKEIFFDQSKNGYAGYIDGGASQEEFYKFIKPILEKMDGTEELLVKLNREDLLRKQRTFDNGSIPHQIHLGELHAILRRQEDFYPFLKDNREKIEKILTFRIPYYVGPLARGNSRFAWMTRKSEETITPWNFEEVVDKGASAQSFIERMTNFDKNLPNEKVLPKHSLLYEYFTVYNELTKVKYVTEGMRKPAFLSGEQKKAIVDLLFKTNRKVTVKQLKEDYFKKIECFDSVEISGVEDRFNASLGTYHDLLKIIKDKDFLDNEENEDILEDIVLTLTLFEDREMIEERLKTYAHLFDDKVMKQLKRRRYTGWGRLSRKLINGIRDKQSGKTILDFLKSDGFANRNFMQLIHDDSLTFKEDIQKAQVSGQGDSLHEHIANLAGSPAIKKGILQTVKVVDELVKVMGRHKPENIVIEMARENQTTQKGQKNSRERMKRIEEGIKELGSQILKEHPVENTQLQNEKLYLYYLQNGRDMYVDQELDINRLSDYDVDHIVPQSFLKDDSIDNKVLTRSDKNRGKSDNVPSEEVVKKMKNYWRQLLNAKLITQRKFDNLTKAERGGLSELDKAGFIKRQLVETRQITKHVAQILDSRMNTKYDENDKLIREVKVITLKSKLVSDFRKDFQFYKVREINNYHHAHDAYLNAVVGTALIKKYPKLESEFVYGDYKVYDVRKMIAKSEQEIGKATAKYFFYSNIMNFFKTEITLANGEIRKRPLIETNGETGEIVWDKGRDFATVRKVLSMPQVNIVKKTEVQTGGFSKESILPKRNSDKLIARKKDWDPKKYGGFVSPTVAYSVLVVAKVEKGKSKKLKSVKELLGITIMERSSFEKNPIDFLEAKGYKEVKKDLIIKLPKYSLFELENGRKRMLASARELQKGNELALPSKYVNFLYLASHYEKLKGSPEDNEQKQLFVEQHKHYLDEIIEQISEFSKRVILADANLDKVLSAYNKHRDKPIREQAENIIHLFTLTNLGAPAAFKYFDTTIDRKQYRSTKEVLDATLIHQSITGLYETRIDLSQLGGDEGADKRTADGSEFESPKKKRKV

SEQ ID NO: 241 - protein, 1588 aa, Artificial Sequence
  Description of Artificial Sequence: Synthetic polypeptide
MSEVEFSHEYWMRHALTLAKRARDEREVPVGAVLVLNNRVIGEGWNRAIGLHDPTAHAEIMALRQGGLVMQNYRLIDATLYVTFEPCVMCAGAMIHSRIGRVVFGVRNAKTGAAGSLMDVLHYPGMNHRVEITEGILADECAALLCYFFRMPRRVFNAQKKAQSSTDSGGSSGGSSGSETPGTSESATPESSGGSSGGSDKKYSIGLAIGTNSVGWAVITDEYKVPSKKFKVLGNTDRHSIKKNLIGALLFDSGETAEATRLKRTARRRYTRRKNRICYLQEIFSNEMAKVDDSFFHRLEESFLVEEDKKHERHPIFGNIVDEVAYHEKYPTIYHLRKKLVDSTDKADLRLIYLALAHMIKFRGHFLIEGDLNPDNSDVDKLFIQLVQTYNQLFEENPINASGVDAKAILSARLSKSRRLENLIAQLPGEKKNGLFGNLIALSLGLTPNFKSNFDLAEDAKLQLSKDTYDDDLDNLLAQIGDQYADLFLAAKNLSDAILLSDILRVNTEITKAPLSASMIKRYDEHHQDLTLLKALVRQQLPEKYKEIFFDQSKNGYAGYIDGGASQEEFYKFIKPILEKMDGTEELLVKLNREDLLRKQRTFDNGSIPHQIHLGELHAILRRQEDFYPFLKDNREKIEKILTFRIPYYVGPLARGNSRFAWMTRKSEETITPWNFEEVVDKGASAQSFIERMTNFDKNLPNEKVLPKHSLLYEYFTVYNELTKVKYVTEGMRKPAFLSGEQKKAIVDLLFKTNRKVTVKQLKEDYFKKIECFDSVEISGVEDRFNASLGTYHDLLKIIKDKDFLDNEENEDILEDIVLTLTLFEDREMIEERLKTYAHLFDDKVMKQLKRRRYTGWGRLSRKLINGIRDKQSGKTILDFLKSDGFANRNFMQLIHDDSLTFKEDIQKAQVSGQGDSLHEHIANLAGSPAIKKGILQTVKVVDELVKVMGRHKPENIVIEMARENQTTQKGQKNSRERMKRIEEGIKELGSQILKEHPVENTQLQNEKLYLYYLQNGRDMYVDQELDINRLSDYDVDHIVPQSFLKDDSIDNKVLTRSDKNRGKSDNVPSEEVVKKMKNYWRQLLNAKLITQRKFDNLTKAERGGLSELDKAGFIKRQLVETRQITKHVAQILDSRMNTKYDENDKLIREVKVITLKSKLVSDFRKDFQFYKVREINNYHHAHDAYLNAVVGTALIKKYPKLESEFVYGDYKVYDVRKMIAKSEQEIGKATAKYFFYSNIMNFFKTEITLANGEIRKRPLIETNGETGEIVWDKGRDFATVRKVLSMPQVNIVKKTEVQTGGFSKESILPKRNSDKLIARKKDWDPKKYGGFVSPTVAYSVLVVAKVEKGKSKKLKSVKELLGITIMERSSFEKNPIDFLEAKGYKEVKKDLIIKLPKYSLFELENGRKRMLASARELQKGNELALPSKYVNFLYLASHYEKLKGSPEDNEQKQLFVEQHKHYLDEIIEQISEFSKRVILADANLDKVLSAYNKHRDKPIREQAENIIHLFTLTNLGAPAAFKYFDTTIDRKQYRSTKEVLDATLIHQSITGLYETRIDLSQLGGDEGADKRTADGSEFESPKKKRKV

SEQ ID NO: 242 - protein, 1588 aa, Artificial Sequence
  Description of Artificial Sequence: Synthetic polypeptide
MSEVEFSHEYWMRHALTLAKRARDEREVPVGAVLVLNNRVIGEGWNRAIGLHDPTAHAEIMALRQGGLVMQNYRLIDATLYVTFEPCVMCAGAMIHSRIGRVVFGVRNAKTGAAGSLMDVLHHPGMNHRVEITEGILADECAALLCRFFRMPRRVFNAQKKAQSSTDSGGSSGGSSGSETPGTSESATPESSGGSSGGSDKKYSIGLAIGTNSVGWAVITDEYKVPSKKFKVLGNTDRHSIKKNLIGALLFDSGETAEATRLKRTARRRYTRRKNRICYLQEIFSNEMAKVDDSFFHRLEESFLVEEDKKHERHPIFGNIVDEVAYHEKYPTIYHLRKKLVDSTDKADLRLIYLALAHMIKFRGHFLIEGDLNPDNSDVDKLFIQLVQTYNQLFEENPINASGVDAKAILSARLSKSRRLENLIAQLPGEKKNGLFGNLIALSLGLTPNFKSNFDLAEDAKLQLSKDTYDDDLDNLLAQIGDQYADLFLAAKNLSDAILLSDILRVNTEITKAPLSASMIKRYDEHHQDLTLLKALVRQQLPEKYKEIFFDQSKNGYAGYIDGGASQEEFYKFIKPILEKMDGTEELLVKLNREDLLRKQRTFDNGSIPHQIHLGELHAILRRQEDFYPFLKDNREKIEKILTFRIPYYVGPLARGNSRFAWMTRKSEETITPWNFEEVVDKGASAQSFIERMTNFDKNLPNEKVLPKHSLLYEYFTVYNELTKVKYVTEGMRKPAFLSGEQKKAIVDLLFKTNRKVTVKQLKEDYFKKIECFDSVEISGVEDRFNASLGTYHDLLKIIKDKDFLDNEENEDILEDIVLTLTLFEDREMIEERLKTYAHLFDDKVMKQLKRRRYTGWGRLSRKLINGIRDKQSGKTILDFLKSDGFANRNFMQLIHDDSLTFKEDIQKAQVSGQGDSLHEHIANLAGSPAIKKGILQTVKVVDELVKVMGRHKPENIVIEMARENQTTQKGQKNSRERMKRIEEGIKELGSQILKEHPVENTQLQNEKLYLYYLQNGRDMYVDQELDINRLSDYDVDHIVPQSFLKDDSIDNKVLTRSDKNRGKSDNVPSEEVVKKMKNYWRQLLNAKLITQRKFDNLTKAERGGLSELDKAGFIKRQLVETRQITKHVAQILDSRMNTKYDENDKLIREVKVITLKSKLVSDFRKDFQFYKVREINNYHHAHDAYLNAVVGTALIKKYPKLESEFVYGDYKVYDVRKMIAKSEQEIGKATAKYFFYSNIMNFFKTEITLANGEIRKRPLIETNGETGEIVWDKGRDFATVRKVLSMPQVNIVKKTEVQTGGFSKESILPKRNSDKLIARKKDWDPKKYGGFVSPTVAYSVLVVAKVEKGKSKKLKSVKELLGITIMERSSFEKNPIDFLEAKGYKEVKKDLIIKLPKYSLFELENGRKRMLASARELQKGNELALPSKYVNFLYLASHYEKLKGSPEDNEQKQLFVEQHKHYLDEIIEQISEFSKRVILADANLDKVLSAYNKHRDKPIREQAENIIHLFTLTNLGAPAAFKYFDTTIDRKQYRSTKEVLDATLIHQSITGLYETRIDLSQLGGDEGADKRTADGSEFESPKKKRKV

SEQ ID NO: 243 - protein, 1588 aa, Artificial Sequence
  Description of Artificial Sequence: Synthetic polypeptide
MSEVEFSHEYWMRHALTLAKRARDEREVPVGAVLVLNNRVIGEGWNRAIGLHDPTAHAEIMALRQGGLVMQNYRLYDATLYVTFEPCVMCAGAMIHSRIGRVVFGVRNAKTGAAGSLMDVLHYPGMNHRVEITEGILADECAALLCRFFRMPRRVFNAQKKAQSSTDSGGSSGGSSGSETPGTSESATPESSGGSSGGSDKKYSIGLAIGTNSVGWAVITDEYKVPSKKFKVLGNTDRHSIKKNLIGALLFDSGETAEATRLKRTARRRYTRRKNRICYLQEIFSNEMAKVDDSFFHRLEESFLVEEDKKHERHPIFGNIVDEVAYHEKYPTIYHLRKKLVDSTDKADLRLIYLALAHMIKFRGHFLIEGDLNPDNSDVDKLFIQLVQTYNQLFEENPINASGVDAKAILSARLSKSRRLENLIAQLPGEKKNGLFGNLIALSLGLTPNFKSNFDLAEDAKLQLSKDTYDDDLDNLLAQIGDQYADLFLAAKNLSDAILLSDILRVNTEITKAPLSASMIKRYDEHHQDLTLLKALVRQQLPEKYKEIFFDQSKNGYAGYIDGGASQEEFYKFIKPILEKMDGTEELLVKLNREDLLRKQRTFDNGSIPHQIHLGELHAILRRQEDFYPFLKDNREKIEKILTFRIPYYVGPLARGNSRFAWMTRKSEETITPWNFEEVVDKGASAQSFIERMTNFDKNLPNEKVLPKHSLLYEYFTVYNELTKVKYVTEGMRKPAFLSGEQKKAIVDLLFKTNRKVTVKQLKEDYFKKIECFDSVEISGVEDRFNASLGTYHDLLKIIKDKDFLDNEENEDILEDIVLTLTLFEDREMIEERLKTYAHLFDDKVMKQLKRRRYTGWGRLSRKLINGIRDKQSGKTILDFLKSDGFANRNFMQLIHDDSLTFKEDIQKAQVSGQGDSLHEHIANLAGSPAIKKGILQTVKVVDELVKVMGRHKPENIVIEMARENQTTQKGQKNSRERMKRIEEGIKELGSQILKEHPVENTQLQNEKLYLYYLQNGRDMYVDQELDINRLSDYDVDHIVPQSFLKDDSIDNKVLTRSDKNRGKSDNVPSEEVVKKMKNYWRQLLNAKLITQRKFDNLTKAERGGLSELDKAGFIKRQLVETRQITKHVAQILDSRMNTKYDENDKLIREVKVITLKSKLVSDFRKDFQFYKVREINNYHHAHDAYLNAVVGTALIKKYPKLESEFVYGDYKVYDVRKMIAKSEQEIGKATAKYFFYSNIMNFFKTEITLANGEIRKRPLIETNGETGEIVWDKGRDFATVRKVLSMPQVNIVKKTEVQTGGFSKESILPKRNSDKLIARKKDWDPKKYGGFVSPTVAYSVLVVAKVEKGKSKKLKSVKELLGITIMERSSFEKNPIDFLEAKGYKEVKKDLIIKLPKYSLFELENGRKRMLASARELQKGNELALPSKYVNFLYLASHYEKLKGSPEDNEQKQLFVEQHKHYLDEIIEQISEFSKRVILADANLDKVLSAYNKHRDKPIREQAENIIHLFTLTNLGAPAAFKYFDTTIDRKQYRSTKEVLDATLIHQSITGLYETRIDLSQLGGDEGADKRTADGSEFESPKKKRKV

SEQ ID NO: 244 - protein, 1588 aa, Artificial Sequence
  Description of Artificial Sequence: Synthetic polypeptide
MSEVEFSHEYWMRHALTLAKRARDEREVPVGAVLVLNNRVIGEGWNRAIGLHDPTAHAEIMALRQGGLVMQNYRLIDATLYVTFEPCVMCAGAMIHSRIGRVVFGVRNAKTGAAGSLMDVLHYPGMNHRVEITEGILADECAALLCRFFRMPRRVFNAQKKAQSSRDSGGSSGGSSGSETPGTSESATPESSGGSSGGSDKKYSIGLAIGTNSVGWAVITDEYKVPSKKFKVLGNTDRHSIKKNLIGALLFDSGETAEATRLKRTARRRYTRRKNRICYLQEIFSNEMAKVDDSFFHRLEESFLVEEDKKHERHPIFGNIVDEVAYHEKYPTIYHLRKKLVDSTDKADLRLIYLALAHMIKFRGHFLIEGDLNPDNSDVDKLFIQLVQTYNQLFEENPINASGVDAKAILSARLSKSRRLENLIAQLPGEKKNGLFGNLIALSLGLTPNFKSNFDLAEDAKLQLSKDTYDDDLDNLLAQIGDQYADLFLAAKNLSDAILLSDILRVNTEITKAPLSASMIKRYDEHHQDLTLLKALVRQQLPEKYKEIFFDQSKNGYAGYIDGGASQEEFYKFIKPILEKMDGTEELLVKLNREDLLRKQRTFDNGSIPHQIHLGELHAILRRQEDFYPFLKDNREKIEKILTFRIPYYVGPLARGNSRFAWMTRKSEETITPWNFEEVVDKGASAQSFIERMTNFDKNLPNEKVLPKHSLLYEYFTVYNELTKVKYVTEGMRKPAFLSGEQKKAIVDLLFKTNRKVTVKQLKEDYFKKIECFDSVEISGVEDRFNASLGTYHDLLKIIKDKDFLDNEENEDILEDIVLTLTLFEDREMIEERLKTYAHLFDDKVMKQLKRRRYTGWGRLSRKLINGIRDKQSGKTILDFLKSDGFANRNFMQLIHDDSLTFKEDIQKAQVSGQGDSLHEHIANLAGSPAIKKGILQTVKVVDELVKVMGRHKPENIVIEMARENQTTQKGQKNSRERMKRIEEGIKELGSQILKEHPVENTQLQNEKLYLYYLQNGRDMYVDQELDINRLSDYDVDHIVPQSFLKDDSIDNKVLTRSDKNRGKSDNVPSEEVVKKMKNYWRQLLNAKLITQRKFDNLTKAERGGLSELDKAGFIKRQLVETRQITKHVAQILDSRMNTKYDENDKLIREVKVITLKSKLVSDFRKDFQFYKVREINNYHHAHDAYLNAVVGTALIKKYPKLESEFVYGDYKVYDVRKMIAKSEQEIGKATAKYFFYSNIMNFFKTEITLANGEIRKRPLIETNGETGEIVWDKGRDFATVRKVLSMPQVNIVKKTEVQTGGFSKESILPKRNSDKLIARKKDWDPKKYGGFVSPTVAYSVLVVAKVEKGKSKKLKSVKELLGITIMERSSFEKNPIDFLEAKGYKEVKKDLIIKLPKYSLFELENGRKRMLASARELQKGNELALPSKYVNFLYLASHYEKLKGSPEDNEQKQLFVEQHKHYLDEIIEQISEFSKRVILADANLDKVLSAYNKHRDKPIREQAENIIHLFTLTNLGAPAAFKYFDTTIDRKQYRSTKEVLDATLIHQSITGLYETRIDLSQLGGDEGADKRTADGSEFESPKKKRKV

SEQ ID NO: 245 - protein, 1588 aa, Artificial Sequence
  Description of Artificial Sequence: Synthetic polypeptide
MSEVEFSHEYWMRHALTLAKRARDEREVPVGAVLVLNNRVIGEGWNRAIGLHDPTAHAEIMALRQGGLVMQNYRLIDATLYVTFEPCVMCAGAMIHSRIGRVVFGVRNAKTGAAGSLMDVLHYPGMNHRVEITEGILADECAALLCTFFRMPRRVFNAQKKAQSSTDSGGSSGGSSGSETPGTSESATPESSGGSSGGSDKKYSIGLAIGTNSVGWAVITDEYKVPSKKFKVLGNTDRHSIKKNLIGALLFDSGETAEATRLKRTARRRYTRRKNRICYLQEIFSNEMAKVDDSFFHRLEESFLVEEDKKHERHPIFGNIVDEVAYHEKYPTIYHLRKKLVDSTDKADLRLIYLALAHMIKFRGHFLIEGDLNPDNSDVDKLFIQLVQTYNQLFEENPINASGVDAKAILSARLSKSRRLENLIAQLPGEKKNGLFGNLIALSLGLTPNFKSNFDLAEDAKLQLSKDTYDDDLDNLLAQIGDQYADLFLAAKNLSDAILLSDILRVNTEITKAPLSASMIKRYDEHHQDLTLLKALVRQQLPEKYKEIFFDQSKNGYAGYIDGGASQEEFYKFIKPILEKMDGTEELLVKLNREDLLRKQRTFDNGSIPHQIHLGELHAILRRQEDFYPFLKDNREKIEKILTFRIPYYVGPLARGNSRFAWMTRKSEETITPWNFEEVVDKGASAQSFIERMTNFDKNLPNEKVLPKHSLLYEYFTVYNELTKVKYVTEGMRKPAFLSGEQKKAIVDLLFKTNRKVTVKQLKEDYFKKIECFDSVEISGVEDRFNASLGTYHDLLKIIKDKDFLDNEENEDILEDIVLTLTLFEDREMIEERLKTYAHLFDDKVMKQLKRRRYTGWGRLSRKLINGIRDKQSGKTILDFLKSDGFANRNFMQLIHDDSLTFKEDIQKAQVSGQGDSLHEHIANLAGSPAIKKGILQTVKVVDELVKVMGRHKPENIVIEMARENQTTQKGQKNSRERMKRIEEGIKELGSQILKEHPVENTQLQNEKLYLYYLQNGRDMYVDQELDINRLSDYDVDHIVPQSFLKDDSIDNKVLTRSDKNRGKSDNVPSEEVVKKMKNYWRQLLNAKLITQRKFDNLTKAERGGLSELDKAGFIKRQLVETRQITKHVAQILDSRMNTKYDENDKLIREVKVITLKSKLVSDFRKDFQFYKVREINNYHHAHDAYLNAVVGTALIKKYPKLESEFVYGDYKVYDVRKMIAKSEQEIGKATAKYFFYSNIMNFFKTEITLANGEIRKRPLIETNGETGEIVWDKGRDFATVRKVLSMPQVNIVKKTEVQTGGFSKESILPKRNSDKLIARKKDWDPKKYGGFVSPTVAYSVLVVAKVEKGKSKKLKSVKELLGITIMERSSFEKNPIDFLEAKGYKEVKKDLIIKLPKYSLFELENGRKRMLASARELQKGNELALPSKYVNFLYLASHYEKLKGSPEDNEQKQLFVEQHKHYLDEIIEQISEFSKRVILADANLDKVLSAYNKHRDKPIREQAENIIHLFTLTNLGAPAAFKYFDTTIDRKQYRSTKEVLDATLIHQSITGLYETRIDLSQLGGDEGADKRTADGSEFESPKKKRKV

SEQ ID NO: 246 - protein, 1588 aa, Artificial Sequence
  Description of Artificial Sequence: Synthetic polypeptide
MSEVEFSHEYWMRHALTLAKRARDEREVPVGAVLVLNNRVIGEGWNRAIGLHDPTAHAEIMALRQGGLVMQNYRLIDATLYVTFEPCVMCAGAMIHSRIGRVVFGVRNAKTGAAGSLMDVLHYPGMNHRVEITEGILADECAALLCTFFRMPRSVFNAQKKAQSSTDSGGSSGGSSGSETPGTSESATPESSGGSSGGSDKKYSIGLAIGTNSVGWAVITDEYKVPSKKFKVLGNTDRHSIKKNLIGALLFDSGETAEATRLKRTARRRYTRRKNRICYLQEIFSNEMAKVDDSFFHRLEESFLVEEDKKHERHPIFGNIVDEVAYHEKYPTIYHLRKKLVDSTDKADLRLIYLALAHMIKFRGHFLIEGDLNPDNSDVDKLFIQLVQTYNQLFEENPINASGVDAKAILSARLSKSRRLENLIAQLPGEKKNGLFGNLIALSLGLTPNFKSNFDLAEDAKLQLSKDTYDDDLDNLLAQIGDQYADLFLAAKNLSDAILLSDILRVNTEITKAPLSASMIKRYDEHHQDLTLLKALVRQQLPEKYKEIFFDQSKNGYAGYIDGGASQEEFYKFIKPILEKMDGTEELLVKLNREDLLRKQRTFDNGSIPHQIHLGELHAILRRQEDFYPFLKDNREKIEKILTFRIPYYVGPLARGNSRFAWMTRKSEETITPWNFEEVVDKGASAQSFIERMTNFDKNLPNEKVLPKHSLLYEYFTVYNELTKVKYVTEGMRKPAFLSGEQKKAIVDLLFKTNRKVTVKQLKEDYFKKIECFDSVEISGVEDRFNASLGTYHDLLKIIKDKDFLDNEENEDILEDIVLTLTLFEDREMIEERLKTYAHLFDDKVMKQLKRRRYTGWGRLSRKLINGIRDKQSGKTILDFLKSDGFANRNFMQLIHDDSLTFKEDIQKAQVSGQGDSLHEHIANLAGSPAIKKGILQTVKVVDELVKVMGRHKPENIVIEMARENQTTQKGQKNSRERMKRIEEGIKELGSQILKEHPVENTQLQNEKLYLYYLQNGRDMYVDQELDINRLSDYDVDHIVPQSFLKDDSIDNKVLTRSDKNRGKSDNVPSEEVVKKMKNYWRQLLNAKLITQRKFDNLTKAERGGLSELDKAGFIKRQLVETRQITKHVAQILDSRMNTKYDENDKLIREVKVITLKSKLVSDFRKDFQFYKVREINNYHHAHDAYLNAVVGTALIKKYPKLESEFVYGDYKVYDVRKMIAKSEQEIGKATAKYFFYSNIMNFFKTEITLANGEIRKRPLIETNGETGEIVWDKGRDFATVRKVLSMPQVNIVKKTEVQTGGFSKESILPKRNSDKLIARKKDWDPKKYGGFVSPTVAYSVLVVAKVEKGKSKKLKSVKELLGITIMERSSFEKNPIDFLEAKGYKEVKKDLIIKLPKYSLFELENGRKRMLASARELQKGNELALPSKYVNFLYLASHYEKLKGSPEDNEQKQLFVEQHKHYLDEIIEQISEFSKRVILADANLDKVLSAYNKHRDKPIREQAENIIHLFTLTNLGAPAAFKYFDTTIDRKQYRSTKEVLDATLIHQSITGLYETRIDLSQLGGDEGADKRTADGSEFESPKKKRKV

SEQ ID NO: 247 - protein, 1588 aa, Artificial Sequence
  Description of Artificial Sequence: Synthetic polypeptide
MSEVEFSHEYWMRHALTLAKRARDEREVPVGAVLVLNNRVIGEGWNRAIGLHDPTAHAEIMALRQGGLVMQNYRLYDATLYVTFEPCVMCAGAMIHSRIGRVVFGVRNAKTGAAGSLMDVLHHPGMNHRVEITEGILADECAALLCRFFRMPRRVFNAQKKAQSSTDSGGSSGGSSGSETPGTSESATPESSGGSSGGSDKKYSIGLAIGTNSVGWAVITDEYKVPSKKFKVLGNTDRHSIKKNLIGALLFDSGETAEATRLKRTARRRYTRRKNRICYLQEIFSNEMAKVDDSFFHRLEESFLVEEDKKHERHPIFGNIVDEVAYHEKYPTIYHLRKKLVDSTDKADLRLIYLALAHMIKFRGHFLIEGDLNPDNSDVDKLFIQLVQTYNQLFEENPINASGVDAKAILSARLSKSRRLENLIAQLPGEKKNGLFGNLIALSLGLTPNFKSNFDLAEDAKLQLSKDTYDDDLDNLLAQIGDQYADLFLAAKNLSDAILLSDILRVNTEITKAPLSASMIKRYDEHHQDLTLLKALVRQQLPEKYKEIFFDQSKNGYAGYIDGGASQEEFYKFIKPILEKMDGTEELLVKLNREDLLRKQRTFDNGSIPHQIHLGELHAILRRQEDFYPFLKDNREKIEKILTFRIPYYVGPLARGNSRFAWMTRKSEETITPWNFEEVVDKGASAQSFIERMTNFDKNLPNEKVLPKHSLLYEYFTVYNELTKVKYVTEGMRKPAFLSGEQKKAIVDLLFKTNRKVTVKQLKEDYFKKIECFDSVEISGVEDRFNASLGTYHDLLKIIKDKDFLDNEENEDILEDIVLTLTLFEDREMIEERLKTYAHLFDDKVMKQLKRRRYTGWGRLSRKLINGIRDKQSGKTILDFLKSDGFANRNFMQLIHDDSLTFKEDIQKAQVSGQGDSLHEHIANLAGSPAIKKGILQTVKVVDELVKVMGRHKPENIVIEMARENQTTQKGQKNSRERMKRIEEGIKELGSQILKEHPVENTQLQNEKLYLYYLQNGRDMYVDQELDINRLSDYDVDHIVPQSFLKDDSIDNKVLTRSDKNRGKSDNVPSEEVVKKMKNYWRQLLNAKLITQRKFDNLTKAERGGLSELDKAGFIKRQLVETRQITKHVAQILDSRMNTKYDENDKLIREVKVITLKSKLVSDFRKDFQFYKVREINNYHHAHDAYLNAVVGTALIKKYPKLESEFVYGDYKVYDVRKMIAKSEQEIGKATAKYFFYSNIMNFFKTEITLANGEIRKRPLIETNGETGEIVWDKGRDFATVRKVLSMPQVNIVKKTEVQTGGFSKESILPKRNSDKLIARKKDWDPKKYGGFVSPTVAYSVLVVAKVEKGKSKKLKSVKELLGITIMERSSFEKNPIDFLEAKGYKEVKKDLIIKLPKYSLFELENGRKRMLASARELQKGNELALPSKYVNFLYLASHYEKLKGSPEDNEQKQLFVEQHKHYLDEIIEQISEFSKRVILADANLDKVLSAYNKHRDKPIREQAENIIHLFTLTNLGAPAAFKYFDTTIDRKQYRSTKEVLDATLIHQSITGLYETRIDLSQLGGDEGADKRTADGSEFESPKKKRKV

SEQ ID NO: 248 - protein, 1588 aa, Artificial Sequence
  Description of Artificial Sequence: Synthetic polypeptide
MSEVEFSHEYWMRHALTLAKRARDEREVPVGAVLVLNNRVIGEGWNRAIGLHDPTAHAEIMALRQGGLVMQNYRLIDATLYSTFEPCVMCAGAMIHSRIGRVVFGVRNAKTGAAGSLMDVLHYPGMNHRVEITEGILADECAALLCYFFRMPRRVFNAQKKAQSSTDSGGSSGGSSGSETPGTSESATPESSGGSSGGSDKKYSIGLAIGTNSVGWAVITDEYKVPSKKFKVLGNTDRHSIKKNLIGALLFDSGETAEATRLKRTARRRYTRRKNRICYLQEIFSNEMAKVDDSFFHRLEESFLVEEDKKHERHPIFGNIVDEVAYHEKYPTIYHLRKKLVDSTDKADLRLIYLALAHMIKFRGHFLIEGDLNPDNSDVDKLFIQLVQTYNQLFEENPINASGVDAKAILSARLSKSRRLENLIAQLPGEKKNGLFGNLIALSLGLTPNFKSNFDLAEDAKLQLSKDTYDDDLDNLLAQIGDQYADLFLAAKNLSDAILLSDILRVNTEITKAPLSASMIKRYDEHHQDLTLLKALVRQQLPEKYKEIFFDQSKNGYAGYIDGGASQEEFYKFIKPILEKMDGTEELLVKLNREDLLRKQRTFDNGSIPHQIHLGELHAILRRQEDFYPFLKDNREKIEKILTFRIPYYVGPLARGNSRFAWMTRKSEETITPWNFEEVVDKGASAQSFIERMTNFDKNLPNEKVLPKHSLLYEYFTVYNELTKVKYVTEGMRKPAFLSGEQKKAIVDLLFKTNRKVTVKQLKEDYFKKIECFDSVEISGVEDRFNASLGTYHDLLKIIKDKDFLDNEENEDILEDIVLTLTLFEDREMIEERLKTYAHLFDDKVMKQLKRRRYTGWGRLSRKLINGIRDKQSGKTILDFLKSDGFANRNFMQLIHDDSLTFKEDIQKAQVSGQGDSLHEHIANLAGSPAIKKGILQTVKVVDELVKVMGRHKPENIVIEMARENQTTQKGQKNSRERMKRIEEGIKELGSQILKEHPVENTQLQNEKLYLYYLQNGRDMYVDQELDINRLSDYDVDHIVPQSFLKDDSIDNKVLTRSDKNRGKSDNVPSEEVVKKMKNYWRQLLNAKLITQRKFDNLTKAERGGLSELDKAGFIKRQLVETRQITKHVAQILDSRMNTKYDENDKLIREVKVITLKSKLVSDFRKDFQFYKVREINNYHHAHDAYLNAVVGTALIKKYPKLESEFVYGDYKVYDVRKMIAKSEQEIGKATAKYFFYSNIMNFFKTEITLANGEIRKRPLIETNGETGEIVWDKGRDFATVRKVLSMPQVNIVKKTEVQTGGFSKESILPKRNSDKLIARKKDWDPKKYGGFVSPTVAYSVLVVAKVEKGKSKKLKSVKELLGITIMERSSFEKNPIDFLEAKGYKEVKKDLIIKLPKYSLFELENGRKRMLASARELQKGNELALPSKYVNFLYLASHYEKLKGSPEDNEQKQLFVEQHKHYLDEIIEQISEFSKRVILADANLDKVLSAYNKHRDKPIREQAENIIHLFTLTNLGAPAAFKYFDTTIDRKQYRSTKEVLDATLIHQSITGLYETRIDLSQLGGDEGADKRTADGSEFESPKKKRKV

SEQ ID NO: 249 - protein, 4 aa, Artificial Sequence
  Description of Artificial Sequence: Synthetic peptide
SGGS

SEQ ID NO: 250 - protein, 21 aa, Artificial Sequence
  Description of Artificial Sequence: Synthetic peptide
  MISC_FEATURE (1)..(21): This sequence may encompass 1, 3, or 7 "Gly Gly Ser" repeating units
GGSGGSGGSGGSGGSGGSGGS

SEQ ID NO: 251 - protein, 5 aa, Artificial Sequence
  Description of Artificial Sequence: Synthetic peptide
PAPAP

SEQ ID NO: 252 - protein, 6 aa, Artificial Sequence
  Description of Artificial Sequence: Synthetic peptide
PAPAPA

SEQ ID NO: 253 - protein, 7 aa, Artificial Sequence
  Description of Artificial Sequence: Synthetic peptide
PAPAPAP

SEQ ID NO: 254 - protein, 8 aa, Artificial Sequence
  Description of Artificial Sequence: Synthetic peptide
PAPAPAPA

SEQ ID NO: 255 - protein, 9 aa, Artificial Sequence
  Description of Artificial Sequence: Synthetic peptide
PAPAPAPAP

SEQ ID NO: 256 - protein, 15 aa, Artificial Sequence
  Description of Artificial Sequence: Synthetic peptide
PAPAPAPAPAPAPAP

SEQ ID NO: 257 - protein, 21 aa, Artificial Sequence
  Description of Artificial Sequence: Synthetic peptide
PAPAPAPAPAPAPAPAPAPAP

SEQ ID NO: 258 - RNA, 23 nt, Artificial Sequence
  Description of Artificial Sequence: Synthetic oligonucleotide
acuucuccucaggagucaggugc

SEQ ID NO: 259 - DNA, 23 bp, Unknown
  Description of Unknown: target sequence
acttctcctcaggagtcaggtgc

SEQ ID NO: 260 - RNA, 20 nt, Artificial Sequence
  Description of Artificial Sequence: Synthetic oligonucleotide
cuugaccaauagccuugaca

SEQ ID NO: 261 - DNA, 20 bp, Unknown
  Description of Unknown: target sequence
cttgaccaatagccttgaca

SEQ ID NO: 262 - DNA, 20 bp, Unknown
  Description of Unknown: target sequence
gcaagctatcttcttaggga

SEQ ID NO: 263 - DNA, 20 bp, Unknown
  Description of Unknown: target sequence
caagctatcttcttagggaa

SEQ ID NO: 264 - RNA, 20 nt, Artificial Sequence
  Description of Artificial Sequence: Synthetic oligonucleotide
augaaacgaaugagaauaag

SEQ ID NO: 265 - RNA, 20 nt, Artificial Sequence
  Description of Artificial Sequence: Synthetic oligonucleotide
uggaugaaacgaaugagaau

SEQ ID NO: 266 - RNA, 20 nt, Artificial Sequence
  Description of Artificial Sequence: Synthetic oligonucleotide
gccaggggaagccucuuccc

SEQ ID NO: 267 - RNA, 20 nt, Artificial Sequence
  Description of Artificial Sequence: Synthetic oligonucleotide
ucuguguacucaacguggaa

SEQ ID NO: 268 - RNA, 20 nt, Artificial Sequence
  Description of Artificial Sequence: Synthetic oligonucleotide
uguguacucaacguggaaaa

SEQ ID NO: 269 - RNA, 20 nt, Artificial Sequence
  Description of Artificial Sequence: Synthetic oligonucleotide
gggaagauuaucccaagucu

SEQ ID NO: 270 - RNA, 20 nt, Artificial Sequence
  Description of Artificial Sequence: Synthetic oligonucleotide
ccagaaauccugacuuacga

SEQ ID NO: 271 - RNA, 20 nt, Artificial Sequence
  Description of Artificial Sequence: Synthetic oligonucleotide
ucugagaaugaaaguaauau

SEQ ID NO: 272 - RNA, 20 nt, Artificial Sequence
  Description of Artificial Sequence: Synthetic oligonucleotide
cuauuuuaacuuugcauuua

SEQ ID NO: 273 - RNA, 20 nt, Artificial Sequence
  Description of Artificial Sequence: Synthetic oligonucleotide
uucacgagccugucguaagu

SEQ ID NO: 274 - RNA, 20 nt, Artificial Sequence
  Description of Artificial Sequence: Synthetic oligonucleotide
cagcaguggaucuauaugaa

SEQ ID NO: 275 - RNA, 20 nt, Artificial Sequence
  Description of Artificial Sequence: Synthetic oligonucleotide
cauuccccaaaccugaacac

SEQ ID NO: 276 - RNA, 20 nt, Artificial Sequence
  Description of Artificial Sequence: Synthetic oligonucleotide
uaucccaagucugagaauga

SEQ ID NO: 277 - RNA, 20 nt, Artificial Sequence
  Description of Artificial Sequence: Synthetic oligonucleotide
auaaaugggaagauuauccc

SEQ ID NO: 278 - RNA, 20 nt, Artificial Sequence
  Description of Artificial Sequence: Synthetic oligonucleotide
uccccaaaccugaacaccag

SEQ ID NO: 279 - RNA, 20 nt, Artificial Sequence
  Description of Artificial Sequence: Synthetic oligonucleotide
gccauucacgagccugucgu

SEQ ID NO: 280 - RNA, 20 nt, Artificial Sequence
  Description of Artificial Sequence: Synthetic oligonucleotide
aaaugucacaacaaccuugg

SEQ ID NO: 281 - RNA, 20 nt, Artificial Sequence
  Description of Artificial Sequence: Synthetic oligonucleotide
cguggaaaagagaaaacagu

SEQ ID NO: 282 - RNA, 20 nt, Artificial Sequence
  Description of Artificial Sequence: Synthetic oligonucleotide
ccauuugacaaagcccggau

SEQ ID NO: 283 - RNA, 20 nt, Artificial Sequence
  Description of Artificial Sequence: Synthetic oligonucleotide
agcaagcuaucuucuuaggg

SEQ ID NO: 284 - RNA, 20 nt, Artificial Sequence
  Description of Artificial Sequence: Synthetic oligonucleotide
ugagguuuauuccugacccc

SEQ ID NO: 285 - RNA, 20 nt, Artificial Sequence
  Description of Artificial Sequence: Synthetic oligonucleotide
ugaauggaucacggaaaagg

SEQ ID NO: 286 - RNA, 20 nt, Artificial Sequence
  Description of Artificial Sequence: Synthetic oligonucleotide
ccacuggcaguacagaagca

SEQ ID NO: 287 - RNA, 20 nt, Artificial Sequence
  Description of Artificial Sequence: Synthetic oligonucleotide
agaaugaauggaucacggaa

SEQ ID NO: 288 - RNA, 20 nt, Artificial Sequence
  Description of Artificial Sequence: Synthetic oligonucleotide
uguaaacgauggagaaaaug

SEQ ID NO: 289 - RNA, 20 nt, Artificial Sequence
  Description of Artificial Sequence: Synthetic oligonucleotide
aggcuuacaacgaugugggc

SEQ ID NO: 290 - RNA, 20 nt, Artificial Sequence
  Description of Artificial Sequence: Synthetic oligonucleotide
aagugaccaauuauucccuc

SEQ ID NO: 291 - RNA, 20 nt, Artificial Sequence
  Description of Artificial Sequence: Synthetic oligonucleotide
ugucacaacaaccuuggaag

SEQ ID NO: 292 - RNA, 20 nt, Artificial Sequence
  Description of Artificial Sequence: Synthetic oligonucleotide
aauagauugguauuuuuguc

SEQ ID NO: 293 - RNA, 20 nt, Artificial Sequence
  Description of Artificial Sequence: Synthetic oligonucleotide
acaauggcacgguugaaugu

SEQ ID NO: 294 - RNA, 20 nt, Artificial Sequence
  Description of Artificial Sequence: Synthetic oligonucleotide
acacaacaggcacagcuuug

SEQ ID NO: 295 - RNA, 20 nt, Artificial Sequence
  Description of Artificial Sequence: Synthetic oligonucleotide
guucagaguucuauagauuc

SEQ ID NO: 296 - RNA, 20 nt, Artificial Sequence
  Description of Artificial Sequence: Synthetic oligonucleotide
agauuugauuguugaauaug

SEQ ID NO: 297 - RNA, 20 nt, Artificial Sequence
  Description of Artificial Sequence: Synthetic oligonucleotide
auaaacauuaaaugcuaugg

SEQ ID NO: 298 - RNA, 20 nt, Artificial Sequence
  Description of Artificial Sequence: Synthetic oligonucleotide
auccauccauccaggaaaau

SEQ ID NO: 299 - RNA, 20 nt, Artificial Sequence
  Description of Artificial Sequence: Synthetic oligonucleotide
auggaucacggaaaaggcag

SEQ ID NO: 300 - RNA, 20 nt, Artificial Sequence
  Description of Artificial Sequence: Synthetic oligonucleotide
guugacuaucaguucagcga

SEQ ID NO: 301 - RNA, 20 nt, Artificial Sequence
  Description of Artificial Sequence: Synthetic oligonucleotide
cacaacaaccuuggaaguag

SEQ ID NO: 302 - RNA, 20 nt, Artificial Sequence
  Description of Artificial Sequence: Synthetic oligonucleotide
cuauagauucuagugcauuc

SEQ ID NO: 303 - RNA, 20 nt, Artificial Sequence
  Description of Artificial Sequence: Synthetic oligonucleotide
ugccaauaauacuuuuggau

SEQ ID NO: 304 - RNA, 20 nt, Artificial Sequence
  Description of Artificial Sequence: Synthetic oligonucleotide
gcuuugucaaauggacuuuu

SEQ ID NO: 305 - RNA, 20 nt, Artificial Sequence
  Description of Artificial Sequence: Synthetic oligonucleotide
cuuccccaugauaaacacua

SEQ ID NO: 306 - RNA, 20 nt, Artificial Sequence
  Description of Artificial Sequence: Synthetic oligonucleotide
cguuuggaaagcuagugguu

SEQ ID NO: 307 - RNA, 20 nt, Artificial Sequence
  Description of Artificial Sequence: Synthetic oligonucleotide
aaacuacaggagaaauauaa

SEQ ID NO: 308 - RNA, 20 nt, Artificial Sequence
  Description of Artificial Sequence: Synthetic oligonucleotide
aggaggcacuuacacauucc

SEQ ID NO: 309 - RNA, 20 nt, Artificial Sequence
  Description of Artificial Sequence: Synthetic oligonucleotide
cuugaaugcacuagaaucua

SEQ ID NO: 310 - RNA, 20 nt, Artificial Sequence
  Description of Artificial Sequence: Synthetic oligonucleotide
uuccaaacgguggcccagau

SEQ ID NO: 311 - RNA, 20 nt, Artificial Sequence
  Description of Artificial Sequence: Synthetic oligonucleotide
uccaggaaaaucagacuuaa

SEQ ID NO: 312 - RNA, 20 nt, Artificial Sequence
  Description of Artificial Sequence: Synthetic oligonucleotide
cccucaaggggugccagggg

SEQ ID NO: 313 - RNA, 20 nt, Artificial Sequence
  Description of Artificial Sequence: Synthetic oligonucleotide
uccaaagcaagcuaucuucu

SEQ ID NO: 314 - RNA, 20 nt, Artificial Sequence
  Description of Artificial Sequence: Synthetic oligonucleotide
uagggaaggggaagaauuca

SEQ ID NO: 315 - RNA, 20 nt, Artificial Sequence
  Description of Artificial Sequence: Synthetic oligonucleotide
agcgagaguuaaugauucug

SEQ ID NO: 316 - RNA, 20 nt, Artificial Sequence
  Description of Artificial Sequence: Synthetic oligonucleotide
uuuggaaagcuagugguuca

SEQ ID NO: 317 - RNA, 20 nt, Artificial Sequence
  Description of Artificial Sequence: Synthetic oligonucleotide
agacgguuccccuggacuca

SEQ ID NO: 318 - RNA, 20 nt, Artificial Sequence
  Description of Artificial Sequence: Synthetic oligonucleotide
acguugacuaucaguucagc

SEQ ID NO: 319 - RNA, 20 nt, Artificial Sequence
  Description of Artificial Sequence: Synthetic oligonucleotide
cugcacauccacuggcagua

SEQ ID NO: 320 - RNA, 20 nt, Artificial Sequence
  Description of Artificial Sequence: Synthetic oligonucleotide
cacauccacuggcaguacag

SEQ ID NO: 321 - RNA, 20 nt, Artificial Sequence
  Description of Artificial Sequence: Synthetic oligonucleotide
auccacuggcaguacagaag

SEQ ID NO: 322 - RNA, 20 nt, Artificial Sequence
  Description of Artificial Sequence: Synthetic oligonucleotide
uugacgucagaauuggacac

SEQ ID NO: 323 - RNA, 20 nt, Artificial Sequence
  Description of Artificial Sequence: Synthetic oligonucleotide
auuaacucucgcugaacuga

SEQ ID NO: 324 - RNA, 20 nt, Artificial Sequence
  Description of Artificial Sequence: Synthetic oligonucleotide
ccauacaaggagcggucaac

SEQ ID NO: 325 - RNA, 20 nt, Artificial Sequence
  Description of Artificial Sequence: Synthetic oligonucleotide
uucaggaugaauuuuuccga

SEQ ID NO: 326 - RNA, 20 nt, Artificial Sequence
  Description of Artificial Sequence: Synthetic oligonucleotide
gugacuucaauuaugaacgu

SEQ ID NO: 327 - RNA, 20 nt, Artificial Sequence
  Description of Artificial Sequence: Synthetic oligonucleotide
gucggaaaaauucauccuga

SEQ ID NO: 328 - RNA, 20 nt, Artificial Sequence
  Description of Artificial Sequence: Synthetic oligonucleotide
auuauauuucuccuguaguu

SEQ ID NO: 329 - RNA, 20 nt, Artificial Sequence
  Description of Artificial Sequence: Synthetic oligonucleotide
aaggagcggucaacaaggaa

SEQ ID NO: 330 - RNA, 20 nt, Artificial Sequence
  Description of Artificial Sequence: Synthetic oligonucleotide
gagauuaaaaggcaccgaag

SEQ ID NO: 331 - RNA, 20 nt, Artificial Sequence
  Description of Artificial Sequence: Synthetic oligonucleotide
aacgagauuaaaaggcaccg

SEQ ID NO: 332 - RNA, 20 nt, Artificial Sequence
  Description of Artificial Sequence: Synthetic oligonucleotide
gaaaaauucauccugaaagu

SEQ ID NO: 333 - RNA, 20 nt, Artificial Sequence
  Description of Artificial Sequence: Synthetic oligonucleotide
auucauccugaaagugaggc

SEQ ID NO: 334 - RNA, 20 nt, Artificial Sequence
  Description of Artificial Sequence: Synthetic oligonucleotide
gaaagaagacaacgacacgc

SEQ ID NO: 335 - RNA, 20 nt, Artificial Sequence
  Description of Artificial Sequence: Synthetic oligonucleotide
uacaggagaaauauaauagc

SEQ ID NO: 336 - RNA, 20 nt, Artificial Sequence
  Description of Artificial Sequence: Synthetic oligonucleotide
augagaauaagcagaaugaa

SEQ ID NO: 337 - RNA, 20 nt, Artificial Sequence
  Description of Artificial Sequence: Synthetic oligonucleotide
ccaggggaagccucuuccca

SEQ ID NO: 338 - RNA, 20 nt, Artificial Sequence
  Description of Artificial Sequence: Synthetic oligonucleotide
cagaaauccugacuuacgac

SEQ ID NO: 339 - RNA, 20 nt, Artificial Sequence
  Description of Artificial Sequence: Synthetic oligonucleotide
acagaaccuucacugauaaa

SEQ ID NO: 340 - RNA, 20 nt, Artificial Sequence
  Description of Artificial Sequence: Synthetic oligonucleotide
ucacgagccugucguaaguc

SEQ ID NO: 341 - RNA, 20 nt, Artificial Sequence
  Description of Artificial Sequence: Synthetic oligonucleotide
acuuacgacaggcucgugaa

SEQ ID NO: 342 - RNA, 20 nt, Artificial Sequence
  Description of Artificial Sequence: Synthetic oligonucleotide
uguucauauagauccacugc

SEQ ID NO: 343 - RNA, 20 nt, Artificial Sequence
  Description of Artificial Sequence: Synthetic oligonucleotide
ccaaaccugaacaccagcag

SEQ ID NO: 344 - RNA, 20 nt, Artificial Sequence
  Description of Artificial Sequence: Synthetic oligonucleotide
cugucguaagucaggauuuc

SEQ ID NO: 345 - RNA, 20 nt, Artificial Sequence
  Description of Artificial Sequence: Synthetic oligonucleotide
cagaaccuucacugauaaau

SEQ ID NO: 346 - RNA, 20 nt, Artificial Sequence
  Description of Artificial Sequence: Synthetic oligonucleotide
uauuuuaacuuugcauuuaa

SEQ ID NO: 347 - RNA, 20 nt, Artificial Sequence
  Description of Artificial Sequence: Synthetic oligonucleotide
uaagcagaaugaauggauca

SEQ ID NO: 348 - RNA, 20 nt, Artificial Sequence
  Description of Artificial Sequence: Synthetic oligonucleotide
gaauggcaugcuccaaugug

SEQ ID NO: 349 - RNA, 20 nt, Artificial Sequence
  Description of Artificial Sequence: Synthetic oligonucleotide
gugcagacacuaaacucauc

SEQ ID NO: 350 - RNA, 20 nt, Artificial Sequence
  Description of Artificial Sequence: Synthetic oligonucleotide
ugaccaauuauucccucaag

SEQ ID NO: 351 - RNA, 20 nt, Artificial Sequence
  Description of Artificial Sequence: Synthetic oligonucleotide
gugaccaauuauucccucaa

SEQ ID NO: 352 - RNA, 20 nt, Artificial Sequence
  Description of Artificial Sequence: Synthetic oligonucleotide
agugaccaauuauucccuca

SEQ ID NO: 353 - RNA, 20 nt, Artificial Sequence
  Description of Artificial Sequence: Synthetic oligonucleotide
gaaugaauggaucacggaaa

SEQ ID NO: 354 - RNA, 20 nt, Artificial Sequence
  Description of Artificial Sequence: Synthetic oligonucleotide
ugcagacacuaaacucaucu

SEQ ID NO: 355 - RNA, 20 nt, Artificial Sequence
  Description of Artificial Sequence: Synthetic oligonucleotide
ccaaagcaagcuaucuucuu

SEQ ID NO: 356 - RNA, 20 nt, Artificial Sequence
  Description of Artificial Sequence: Synthetic oligonucleotide
acagcacugacuugcccucc

SEQ ID NO: 357 - RNA, 20 nt, Artificial Sequence
  Description of Artificial Sequence: Synthetic oligonucleotide
ggagggcaagucagugcugu

SEQ ID NO: 358 - RNA, 20 nt, Artificial Sequence
  Description of Artificial Sequence: Synthetic oligonucleotide
cacauaaacauuaaaugcua

SEQ ID NO: 359 - RNA, 20 nt, Artificial Sequence
  Description of Artificial Sequence: Synthetic oligonucleotide
caaauggacuuuugagaucc

SEQ ID NO: 360 - RNA, 20 nt, Artificial Sequence
  Description of Artificial Sequence: Synthetic oligonucleotide
caauggcacgguugaaugua

SEQ ID NO: 361 - RNA, 20 nt, Artificial Sequence
  Description of Artificial Sequence: Synthetic oligonucleotide
aaauacuguaguguuuauca

SEQ ID NO: 362 - RNA, 20 nt, Artificial Sequence
  Description of Artificial Sequence: Synthetic oligonucleotide
caaagcaagcuaucuucuua

SEQ ID NO: 363 - RNA, 20 nt, Artificial Sequence
  Description of Artificial Sequence: Synthetic oligonucleotide
ggaauaaaccucaaguccuu

SEQ ID NO: 364 - RNA, 20 nt, Artificial Sequence
  Description of Artificial Sequence: Synthetic oligonucleotide
accacuagcuuuccaaacgg

SEQ ID NO: 365 - RNA, 20 nt, Artificial Sequence
  Description of Artificial Sequence: Synthetic oligonucleotide
gcaagcuaucuucuuaggga

SEQ ID NO: 366 - RNA, 20 nt, Artificial Sequence
  Description of Artificial Sequence: Synthetic oligonucleotide
caagcuaucuucuuagggaa

SEQ ID NO: 367 - RNA, 20 nt, Artificial Sequence
  Description of Artificial Sequence: Synthetic oligonucleotide
uuugaucaugaugcccgccu

SEQ ID NO: 368 - RNA, 20 nt, Artificial Sequence
  Description of Artificial Sequence: Synthetic oligonucleotide
uugaucaugaugcccgccuu

SEQ ID NO: 369 - RNA, 20 nt, Artificial Sequence
  Description of Artificial Sequence: Synthetic oligonucleotide
auagauugguauuuuugucc

SEQ ID NO: 370 - RNA, 20 nt, Artificial Sequence
  Description of Artificial Sequence: Synthetic oligonucleotide
aggaauaaaccucaaguccu

SEQ ID NO: 371 - RNA, 20 nt, Artificial Sequence
  Description of Artificial Sequence: Synthetic oligonucleotide
cacaacaggcacagcuuuga

SEQ ID NO: 372 - RNA, 20 nt, Artificial Sequence
  Description of Artificial Sequence: Synthetic oligonucleotide
ugacgucagaauuggacacu

SEQ ID NO: 373 - RNA, 20 nt, Artificial Sequence
  Description of Artificial Sequence: Synthetic oligonucleotide
acuacaguauuuguaaacga

SEQ ID NO: 374 - RNA, 20 nt, Artificial Sequence
  Description of Artificial Sequence: Synthetic oligonucleotide
agcaaaugucacaacaaccu

SEQ ID NO: 375 - RNA, 20 nt, Artificial Sequence
  Description of Artificial Sequence: Synthetic oligonucleotide
gucugauuuuccuggaugga

SEQ ID NO: 376 - RNA, 20 nt, Artificial Sequence
  Description of Artificial Sequence: Synthetic oligonucleotide
ugcugauccaaaaguauuau

SEQ ID NO: 377 - RNA, 20 nt, Artificial Sequence
  Description of Artificial Sequence: Synthetic oligonucleotide
aucagacuuaauaguccgcg

SEQ ID NO: 378 - RNA, 20 nt, Artificial Sequence
  Description of Artificial Sequence: Synthetic oligonucleotide
ugcauucaagcacaauggca

SEQ ID NO: 379 - RNA, 20 nt, Artificial Sequence
  Description of Artificial Sequence: Synthetic oligonucleotide
ucccagagcccacaauagau

SEQ ID NO: 380 - RNA, 20 nt, Artificial Sequence
  Description of Artificial Sequence: Synthetic oligonucleotide
ucagcgagaguuaaugauuc

SEQ ID NO: 381 - RNA, 20 nt, Artificial Sequence
  Description of Artificial Sequence: Synthetic oligonucleotide
gugugaaacgcgccuaccau

SEQ ID NO: 382 - RNA, 20 nt, Artificial Sequence
  Description of Artificial Sequence: Synthetic oligonucleotide
ucagacuuaauaguccgcgu

SEQ ID NO: 383 - RNA, 20 nt, Artificial Sequence
  Description of Artificial Sequence: Synthetic oligonucleotide
ucuagugcauucaagcacaa

SEQ ID NO: 384 - RNA, 20 nt, Artificial Sequence
  Description of Artificial Sequence: Synthetic oligonucleotide
auucccucaaggggugccag

SEQ ID NO: 385 - RNA, 20 nt, Artificial Sequence
  Description of Artificial Sequence: Synthetic oligonucleotide
aaggcagaagccaccaacac

SEQ ID NO: 386 - RNA, 20 nt, Artificial Sequence
  Description of Artificial Sequence: Synthetic oligonucleotide
gagguuuauuccugacccca

SEQ ID NO: 387 - RNA, 20 nt, Artificial Sequence
  Description of Artificial Sequence: Synthetic oligonucleotide
uuuauuccugaccccaaggc

SEQ ID NO: 388 - RNA, 20 nt, Artificial Sequence
  Description of Artificial Sequence: Synthetic oligonucleotide
guuuauuccugaccccaagg

SEQ ID NO: 389 - RNA, 20 nt, Artificial Sequence
  Description of Artificial Sequence: Synthetic oligonucleotide
cauacaaggagcggucaaca

SEQ ID NO: 390 - RNA, 20 nt, Artificial Sequence
  Description of Artificial Sequence: Synthetic oligonucleotide
aaaaauucauccugaaagug

SEQ ID NO: 391 - RNA, 20 nt, Artificial Sequence
  Description of Artificial Sequence: Synthetic oligonucleotide
aaauauaauagcuggcauca

SEQ ID NO: 392 - RNA, 20 nt, Artificial Sequence
  Description of Artificial Sequence: Synthetic oligonucleotide
ugacuucaauuaugaacguc

SEQ ID NO: 393 - RNA, 20 nt, Artificial Sequence
  Description of Artificial Sequence: Synthetic oligonucleotide
cuaguucuguguacucaacg

SEQ ID NO: 394 - RNA, 20 nt, Artificial Sequence
  Description of Artificial Sequence: Synthetic oligonucleotide
agauuaaaaggcaccgaagg

SEQ ID NO: 395 - RNA, 20 nt, Artificial Sequence
  Description of Artificial Sequence: Synthetic oligonucleotide
acgagauuaaaaggcaccga

SEQ ID NO: 396 - RNA, 20 nt, Artificial Sequence
  Description of Artificial Sequence: Synthetic oligonucleotide
ggaugaaacgaaugagaaua

SEQ ID NO: 397 - RNA, 20 nt, Artificial Sequence
  Description of Artificial Sequence: Synthetic oligonucleotide
aacuacaggagaaauauaau

SEQ ID NO: 398 - RNA, 20 nt, Artificial Sequence
  Description of Artificial Sequence: Synthetic oligonucleotide
ugggaaagaagacaacgaca

SEQ ID NO: 399 - RNA, 20 nt, Artificial Sequence
  Description of Artificial Sequence: Synthetic oligonucleotide
gccaauaauacuuuuggauc

SEQ ID NO: 400 - RNA, 20 nt, Artificial Sequence
  Description of Artificial Sequence: Synthetic oligonucleotide
cuuacgacaggcucgugaau

SEQ ID NO: 401 - RNA, 20 nt, Artificial Sequence
  Description of Artificial Sequence: Synthetic oligonucleotide
guuaaaauaggcagaagucu

SEQ ID NO: 402 - RNA, 20 nt, Artificial Sequence
  Description of Artificial Sequence: Synthetic oligonucleotide
uucuguucauauagauccac

SEQ ID NO: 403 - RNA, 20 nt, Artificial Sequence
  Description of Artificial Sequence: Synthetic oligonucleotide
agaaauccugacuuacgaca

SEQ ID NO: 404 - RNA, 20 nt, Artificial Sequence
  Description of Artificial Sequence: Synthetic oligonucleotide
aacgaugugggcaagacuuc

SEQ ID NO: 405 - RNA, 20 nt, Artificial Sequence
  Description of Artificial Sequence: Synthetic oligonucleotide
auuccccaaaccugaacacc

SEQ ID NO: 406 - RNA, 20 nt, Artificial Sequence
  Description of Artificial Sequence: Synthetic oligonucleotide
cgacaggcucgugaauggca

SEQ ID NO: 407 - RNA, 20 nt, Artificial Sequence
  Description of Artificial Sequence: Synthetic oligonucleotide
acuucugccuauuuuaacuu

SEQ ID NO: 408 - RNA, 20 nt, Artificial Sequence
  Description of Artificial Sequence: Synthetic oligonucleotide
gcgacgagauuaggcuguua

SEQ ID NO: 409 - RNA, 20 nt, Artificial Sequence
  Description of Artificial Sequence: Synthetic oligonucleotide
aagacaacgacacgcugguc

SEQ ID NO: 410 - RNA, 20 nt, Artificial Sequence
  Description of Artificial Sequence: Synthetic oligonucleotide
uggaucacggaaaaggcaga

SEQ ID NO: 411 - RNA, 20 nt, Artificial Sequence
  Description of Artificial Sequence: Synthetic oligonucleotide
gacacagacacaacaggcac

SEQ ID NO: 412 - RNA, 20 nt, Artificial Sequence
  Description of Artificial Sequence: Synthetic oligonucleotide
gggaagaauucacagugacg

SEQ ID NO: 413 - RNA, 20 nt, Artificial Sequence
  Description of Artificial Sequence: Synthetic oligonucleotide
gcaccaacaaacacggcuua

SEQ ID NO: 414 - RNA, 20 nt, Artificial Sequence
  Description of Artificial Sequence: Synthetic oligonucleotide
uauagauucuagugcauuca

SEQ ID NO: 415 - RNA, 20 nt, Artificial Sequence
  Description of Artificial Sequence: Synthetic oligonucleotide
ucaugaucaaaagugugaaa

SEQ ID NO: 416 - RNA, 20 nt, Artificial Sequence
  Description of Artificial Sequence: Synthetic oligonucleotide
augaucaaaagugugaaacg

SEQ ID NO: 417 - RNA, 20 nt, Artificial Sequence
  Description of Artificial Sequence: Synthetic oligonucleotide
aaugaauggaucacggaaaa

SEQ ID NO: 418 - RNA, 20 nt, Artificial Sequence
  Description of Artificial Sequence: Synthetic oligonucleotide
ccaauuauucccucaagggg

SEQ ID NO: 419 - RNA, 20 nt, Artificial Sequence
  Description of Artificial Sequence: Synthetic oligonucleotide
cagacuuaauaguccgcgug

SEQ ID NO: 420 - RNA, 20 nt, Artificial Sequence
  Description of Artificial Sequence: Synthetic oligonucleotide
ucugacgucaaugcugccau

SEQ ID NO: 421 - RNA, 20 nt, Artificial Sequence
  Description of Artificial Sequence: Synthetic oligonucleotide
gcauaacagccuaaucucgu

SEQ ID NO: 422 - RNA, 20 nt, Artificial Sequence
  Description of Artificial Sequence: Synthetic oligonucleotide
uuuuuccgacagcacugacu

SEQ ID NO: 423 - RNA, 20 nt, Artificial Sequence
  Description of Artificial Sequence: Synthetic oligonucleotide
uuuccgugauccauucauuc

SEQ ID NO: 424 - RNA, 20 nt, Artificial Sequence
  Description of Artificial Sequence: Synthetic oligonucleotide
uuugacaaagcccggaucag

SEQ ID NO: 425 - RNA, 20 nt, Artificial Sequence
  Description of Artificial Sequence: Synthetic oligonucleotide
gcccagaugaguuuaguguc

SEQ ID NO: 426 - RNA, 20 nt, Artificial Sequence
  Description of Artificial Sequence: Synthetic oligonucleotide
gcugaacugauagucaacgu

SEQ ID NO: 427 - RNA, 20 nt, Artificial Sequence
  Description of Artificial Sequence: Synthetic oligonucleotide
acacuuuugaucaugaugcc

SEQ ID NO: 428 - RNA, 20 nt, Artificial Sequence
  Description of Artificial Sequence: Synthetic oligonucleotide
gaaaaucagacuuaauaguc

SEQ ID NO: 429 - RNA, 20 nt, Artificial Sequence
  Description of Artificial Sequence: Synthetic oligonucleotide
gcagacacuaaacucaucug

SEQ ID NO: 430 - RNA, 20 nt, Artificial Sequence
  Description of Artificial Sequence: Synthetic oligonucleotide
ggaccaggagggcaagucag

SEQ ID NO: 431 - RNA, 20 nt, Artificial Sequence
  Description of Artificial Sequence: Synthetic oligonucleotide
gcugauccaaaaguauuauu

SEQ ID NO: 432 - RNA, 20 nt, Artificial Sequence
  Description of Artificial Sequence: Synthetic oligonucleotide
acauccacuggcaguacaga

SEQ ID NO: 433 - RNA, 20 nt, Artificial Sequence
  Description of Artificial Sequence: Synthetic oligonucleotide
cacuggcaguacagaagcag

SEQ ID NO: 434 - RNA, 20 nt, Artificial Sequence
  Description of Artificial Sequence: Synthetic oligonucleotide
aggcagaagccaccaacacc

SEQ ID NO: 435 - RNA, 20 nt, Artificial Sequence
  Description of Artificial Sequence: Synthetic oligonucleotide
agguuuauuccugaccccaa

SEQ ID NO: 436 - RNA, 20 nt, Artificial Sequence
  Description of Artificial Sequence: Synthetic oligonucleotide
ccaagcuuuuccuuguugac

SEQ ID NO: 437 - RNA, 20 nt, Artificial Sequence
  Description of Artificial Sequence: Synthetic oligonucleotide
uuagugucugcacauccacu

SEQ ID NO: 438 - RNA, 20 nt, Artificial Sequence
  Description of Artificial Sequence: Synthetic oligonucleotide
ccacuagcuuuccaaacggu

SEQ ID NO: 439 - RNA, 20 nt, Artificial Sequence
  Description of Artificial Sequence: Synthetic oligonucleotide
ccucaaggggugccagggga

SEQ ID NO: 440 - RNA, 20 nt, Artificial Sequence
  Description of Artificial Sequence: Synthetic oligonucleotide
ugugaaacgcgccuaccauc

SEQ ID NO: 441 - RNA, 20 nt, Artificial Sequence
  Description of Artificial Sequence: Synthetic oligonucleotide
cuagugcauucaagcacaau

SEQ ID NO: 442 - RNA, 20 nt, Artificial Sequence
  Description of Artificial Sequence: Synthetic oligonucleotide
ccgcgugggcgacgagauua

SEQ ID NO: 443 - RNA, 20 nt, Artificial Sequence
  Description of Artificial Sequence: Synthetic oligonucleotide
uuauuccugaccccaaggcg

SEQ ID NO: 444 - RNA, 20 nt, Artificial Sequence
  Description of Artificial Sequence: Synthetic oligonucleotide
acuccagaaucauuaacucu

SEQ ID NO: 445 - RNA, 20 nt, Artificial Sequence
  Description of Artificial Sequence: Synthetic oligonucleotide
ggcuguuaugcacugauccg

SEQ ID NO: 446 - RNA, 20 nt, Artificial Sequence
  Description of Artificial Sequence: Synthetic oligonucleotide
uucaucuaacgagauuaaaa

SEQ ID NO: 447 - RNA, 20 nt, Artificial Sequence
  Description of Artificial Sequence: Synthetic oligonucleotide
acaggagaaauauaauagcu

SEQ ID NO: 448 - RNA, 20 nt, Artificial Sequence
  Description of Artificial Sequence: Synthetic oligonucleotide
ucaggaugaauuuuuccgac

SEQ ID NO: 449 - RNA, 20 nt, Artificial Sequence
  Description of Artificial Sequence: Synthetic oligonucleotide
gacuucaauuaugaacguca

SEQ ID NO: 450 - RNA, 20 nt, Artificial Sequence
  Description of Artificial Sequence: Synthetic oligonucleotide
aggagcggucaacaaggaaa

SEQ ID NO: 451 - RNA, 20 nt, Artificial Sequence
  Description of Artificial Sequence: Synthetic oligonucleotide
gauuaaaaggcaccgaagga

SEQ ID NO: 452 - RNA, 20 nt, Artificial Sequence
  Description of Artificial Sequence: Synthetic oligonucleotide
aaaauucauccugaaaguga

SEQ ID NO: 453 - DNA, 20 bp, Unknown
  Description of Unknown: target sequence
atgaaacgaatgagaataag

SEQ ID NO: 454 - DNA, 20 bp, Unknown
  Description of Unknown: target sequence
tggatgaaacgaatgagaat

SEQ ID NO: 455 - DNA, 20 bp, Unknown
  Description of Unknown: target sequence
gccaggggaagcctcttccc

SEQ ID NO: 456 - DNA, 20 bp, Unknown
  Description of Unknown: target sequence
tctgtgtactcaacgtggaa

SEQ ID NO: 457 - DNA, 20 bp, Unknown
  Description of Unknown: target sequence
tgtgtactcaacgtggaaaa

SEQ ID NO: 458 - DNA, 20 bp, Unknown
  Description of Unknown: target sequence
gggaagattatcccaagtct

SEQ ID NO: 459 - DNA, 20 bp, Unknown
  Description of Unknown: target sequence
ccagaaatcctgacttacga

SEQ ID NO: 460 - DNA, 20 bp, Unknown
  Description of Unknown: target sequence
tctgagaatgaaagtaatat

SEQ ID NO: 461 - DNA, 20 bp, Unknown
  Description of Unknown: target sequence
ctattttaactttgcattta

SEQ ID NO: 462 - DNA, 20 bp, Unknown
  Description of Unknown: target sequence
ttcacgagcctgtcgtaagt

SEQ ID NO: 463 - DNA, 20 bp, Unknown
  Description of Unknown: target sequence
cagcagtggatctatatgaa

SEQ ID NO: 464 - DNA, 20 bp, Unknown
  Description of Unknown: target sequence
cattccccaaacctgaacac

SEQ ID NO: 465 - DNA, 20 bp, Unknown
  Description of Unknown: target sequence
tatcccaagtctgagaatga

SEQ ID NO: 466 - DNA, 20 bp, Unknown
  Description of Unknown: target sequence
ataaatgggaagattatccc

SEQ ID NO: 467 - DNA, 20 bp, Unknown
  Description of Unknown: target sequence
tccccaaacctgaacaccag

SEQ ID NO: 468 - DNA, 20 bp, Unknown
  Description of Unknown: target sequence
gccattcacgagcctgtcgt

SEQ ID NO: 469 - DNA, 20 bp, Unknown
  Description of Unknown: target sequence
aaatgtcacaacaaccttgg

SEQ ID NO: 470 - DNA, 20 bp, Unknown
  Description of Unknown: target sequence
cgtggaaaagagaaaacagt

SEQ ID NO: 471 - DNA, 20 bp, Unknown
  Description of Unknown: target sequence
ccatttgacaaagcccggat

SEQ ID NO: 472 - DNA, 20 bp, Unknown
  Description of Unknown: target sequence
agcaagctatcttcttaggg

SEQ ID NO: 473 - DNA, 20 bp, Unknown
  Description of Unknown: target sequence
tgaggtttattcctgacccc

SEQ ID NO: 474 - DNA, 20 bp, Unknown
  Description of Unknown: target sequence
tgaatggatcacggaaaagg

SEQ ID NO: 475 - DNA, 20 bp, Unknown
  Description of Unknown: target sequence
ccactggcagtacagaagca

SEQ ID NO: 476 - DNA, 20 bp, Unknown
  Description of Unknown: target sequence
agaatgaatggatcacggaa

SEQ ID NO: 477 - DNA, 20 bp, Unknown
  Description of Unknown: target sequence
tgtaaacgatggagaaaatg

SEQ ID NO: 478 - DNA, 20 bp, Unknown
  Description of Unknown: target sequence
aggcttacaacgatgtgggc

SEQ ID NO: 479 - DNA, 20 bp, Unknown
  Description of Unknown: target sequence
aagtgaccaattattccctc

SEQ ID NO: 480 - DNA, 20 bp, Unknown
  Description of Unknown: target sequence
tgtcacaacaaccttggaag

SEQ ID NO: 481 - DNA, 20 bp, Unknown
  Description of Unknown: target sequence
aatagattggtatttttgtc

SEQ ID NO: 482 - DNA, 20 bp, Unknown
  Description of Unknown: target sequence
acaatggcacggttgaatgt

SEQ ID NO: 483 - DNA, 20 bp, Unknown
  Description of Unknown: target sequence
acacaacaggcacagctttg

SEQ ID NO: 484 - DNA, 20 bp, Unknown
  Description of Unknown: target sequence
gttcagagttctatagattc

SEQ ID NO: 485 - DNA, 20 bp, Unknown
  Description of Unknown: target sequence
agatttgattgttgaatatg

SEQ ID NO: 486 - DNA, 20 bp, Unknown
  Description of Unknown: target sequence
ataaacattaaatgctatgg

SEQ ID NO: 487 - DNA, 20 bp, Unknown
  Description of Unknown: target sequence
atccatccatccaggaaaat

SEQ ID NO: 488 - DNA, 20 bp, Unknown
  Description of Unknown: target sequence
atggatcacggaaaaggcag

SEQ ID NO: 489 - DNA, 20 bp, Unknown
  Description of Unknown: target sequence
gttgactatcagttcagcga

SEQ ID NO: 490 - DNA, 20 bp, Unknown
  Description of Unknown: target sequence
cacaacaaccttggaagtag

SEQ ID NO: 491 - DNA, 20 bp, Unknown
  Description of Unknown: target sequence
ctatagattctagtgcattc

SEQ ID NO: 492 - DNA, 20 bp, Unknown
  Description of Unknown: target sequence
tgccaataatacttttggat

SEQ ID NO: 493 - DNA, 20 bp, Unknown
  Description of Unknown: target sequence
gctttgtcaaatggactttt

SEQ ID NO: 494 - DNA, 20 bp, Unknown
  Description of Unknown: target sequence
cttccccatgataaacacta

SEQ ID NO: 495 - DNA, 20 bp, Unknown
  Description of Unknown: target sequence
cgtttggaaagctagtggtt

SEQ ID NO: 496 - DNA, 20 bp, Unknown
  Description of Unknown: target sequence
aaactacaggagaaatataa

SEQ ID NO: 497 - DNA, 20 bp, Unknown
  Description of Unknown: target sequence
aggaggcacttacacattcc

SEQ ID NO: 498 - DNA, 20 bp, Unknown
  Description of Unknown: target sequence
cttgaatgcactagaatcta

SEQ ID NO: 499 - DNA, 20 bp, Unknown
  Description of Unknown: target sequence
ttccaaacggtggcccagat

SEQ ID NO: 500 - DNA, 20 bp, Unknown
  Description of Unknown: target sequence
tccaggaaaatcagacttaa

SEQ ID NO: 501 - DNA, 20 bp, Unknown
  Description of Unknown: target sequence
ccctcaaggggtgccagggg

SEQ ID NO: 502 - DNA, 20 bp, Unknown
  Description of Unknown: target sequence
tccaaagcaagctatcttct

SEQ ID NO: 503 - DNA, 20 bp, Unknown
  Description of Unknown: target sequence
tagggaaggggaagaattca

SEQ ID NO: 504 - DNA, 20 bp, Unknown
  Description of Unknown: target sequence
agcgagagttaatgattctg

SEQ ID NO: 505 - DNA, 20 bp, Unknown
  Description of Unknown: target sequence
tttggaaagctagtggttca

SEQ ID NO: 506 - DNA, 20 bp, Unknown
  Description of Unknown: target sequence
agacggttcccctggactca

SEQ ID NO: 507 - DNA, 20 bp, Unknown
  Description of Unknown: target sequence
acgttgactatcagttcagc

SEQ ID NO: 508 - DNA, 20 bp, Unknown
  Description of Unknown: target sequence
ctgcacatccactggcagta

SEQ ID NO: 509 - DNA, 20 bp, Unknown
  Description of Unknown: target sequence
cacatccactggcagtacag

SEQ ID NO: 510 - DNA, 20 bp, Unknown
  Description of Unknown: target sequence
atccactggcagtacagaag

SEQ ID NO: 511 - DNA, 20 bp, Unknown
  Description of Unknown: target sequence
ttgacgtcagaattggacac

SEQ ID NO: 512 - DNA, 20 bp, Unknown
  Description of Unknown: target sequence
attaactctcgctgaactga

SEQ ID NO: 513 - DNA, 20 bp, Unknown
  Description of Unknown: target sequence
ccatacaaggagcggtcaac

SEQ ID NO: 514 - DNA, 20 bp, Unknown
  Description of Unknown: target sequence
ttcaggatgaatttttccga

SEQ ID NO: 515 - DNA, 20 bp, Unknown
  Description of Unknown: target sequence
gtgacttcaattatgaacgt

SEQ ID NO: 516 - DNA, 20 bp, Unknown
  Description of Unknown: target sequence
gtcggaaaaattcatcctga

SEQ ID NO: 517 - DNA, 20 bp, Unknown
  Description of Unknown: target sequence
attatatttctcctgtagtt

SEQ ID NO: 518 - DNA, 20 bp, Unknown
  Description of Unknown: target sequence
aaggagcggtcaacaaggaa

SEQ ID NO: 519 - DNA, 20 bp, Unknown
  Description of Unknown: target sequence
gagattaaaaggcaccgaag

SEQ ID NO: 520 - DNA, 20 bp, Unknown
  Description of Unknown: target sequence
aacgagattaaaaggcaccg

SEQ ID NO: 521 - DNA, 20 bp, Unknown
  Description of Unknown: target sequence
gaaaaattcatcctgaaagt

SEQ ID NO: 522 - DNA, 20 bp, Unknown
  Description of Unknown: target sequence
attcatcctgaaagtgaggc

SEQ ID NO: 523 - DNA, 20 bp, Unknown
  Description of Unknown: target sequence
gaaagaagacaacgacacgc

SEQ ID NO: 524 - DNA, 20 bp, Unknown
  Description of Unknown: target sequence
tacaggagaaatataatagc

SEQ ID NO: 525 - DNA, 20 bp, Unknown
  Description of Unknown: target sequence
atgagaataagcagaatgaa

SEQ ID NO: 526 - DNA, 20 bp, Unknown
  Description of Unknown: target sequence
ccaggggaagcctcttccca

SEQ ID NO: 527 - DNA, 20 bp, Unknown
  Description of Unknown: target sequence
cagaaatcctgacttacgac

SEQ ID NO: 528 - DNA, 20 bp, Unknown
  Description of Unknown: target sequence
acagaaccttcactgataaa

SEQ ID NO: 529 - DNA, 20 bp, Unknown
  Description of Unknown: target sequence
tcacgagcctgtcgtaagtc

SEQ ID NO: 530 - DNA, 20 bp, Unknown
  Description of Unknown: target sequence
tgttcatatagatccactgc

SEQ ID NO: 531 - DNA, 20 bp, Unknown
  Description of Unknown: target sequence
ccaaacctgaacaccagcag

SEQ ID NO: 532 - DNA, 20 bp, Unknown
  Description of Unknown: target sequence
ctgtcgtaagtcaggatttc

SEQ ID NO: 533 - DNA, 20 bp, Unknown
  Description of Unknown: target sequence
cagaaccttcactgataaat

SEQ ID NO: 534 - DNA, 20 bp, Unknown
  Description of Unknown: target sequence
tattttaactttgcatttaa

SEQ ID NO: 535 - DNA, 20 bp, Unknown
  Description of Unknown: target sequence
taagcagaatgaatggatca

SEQ ID NO: 536 - DNA, 20 bp, Unknown
  Description of Unknown: target sequence
gaatggcatgctccaatgtg

SEQ ID NO: 537 - DNA, 20 bp, Unknown
  Description of Unknown: target sequence
gtgcagacactaaactcatc

SEQ ID NO: 538 - DNA, 20 bp, Unknown
  Description of Unknown: target sequence
gtgaccaattattccctcaa

SEQ ID NO: 539 - DNA, 20 bp, Unknown
  Description of Unknown: target sequence
gaatgaatggatcacggaaa

SEQ ID NO: 540 - DNA, 20 bp, Unknown
  Description of Unknown: target sequence
tgcagacactaaactcatct

SEQ ID NO: 541 - DNA, 20 bp, Unknown
  Description of Unknown: target sequence
ccaaagcaagctatcttctt

SEQ ID NO: 542 - DNA, 20 bp, Unknown
  Description of Unknown: target sequence
acagcactgacttgccctcc

SEQ ID NO: 543 - DNA, 20 bp, Unknown
  Description of Unknown: target sequence
ggagggcaagtcagtgctgt

SEQ ID NO: 544 - DNA, 20 bp, Unknown
  Description of Unknown: target sequence
cacataaacattaaatgcta

SEQ ID NO: 545 - DNA, 20 bp, Unknown
  Description of Unknown: target sequence
caaatggacttttgagatcc

SEQ ID NO: 546 - DNA, 20 bp, Unknown
  Description of Unknown: target sequence
caatggcacggttgaatgta

SEQ ID NO: 547 - DNA, 20 bp, Unknown
  Description of Unknown: target sequence
aaatactgtagtgtttatca

SEQ ID NO: 548 - DNA, 20 bp, Unknown
  Description of Unknown: target sequence
caaagcaagctatcttctta

SEQ ID NO: 549 - DNA, 20 bp, Unknown
  Description of Unknown: target sequence
ggaataaacctcaagtcctt

SEQ ID NO: 550 - DNA, 20 bp, Unknown
  Description of Unknown: target sequence
accactagctttccaaacgg

SEQ ID NO: 551 - DNA, 20 bp, Unknown
  Description of Unknown: target sequence
tttgatcatgatgcccgcct

SEQ ID NO: 552 - DNA, 20 bp, Unknown
  Description of Unknown: target sequence
ttgatcatgatgcccgcctt

SEQ ID NO: 553 - DNA, 20 bp, Unknown
  Description of Unknown: target sequence
atagattggtatttttgtcc

SEQ ID NO: 554 - DNA, 20 bp, Unknown
  Description of Unknown: target sequence
aggaataaacctcaagtcct

SEQ ID NO: 555 - DNA, 20 bp, Unknown
  Description of Unknown: target sequence
cacaacaggcacagctttga

SEQ ID NO: 556 - DNA, 20 bp, Unknown
  Description of Unknown: target sequence
tgacgtcagaattggacact

SEQ ID NO: 557 - DNA, 20 bp, Unknown
  Description of Unknown: target sequence
agcaaatgtcacaacaacct

SEQ ID NO: 558 - DNA, 20 bp, Unknown
  Description of Unknown: target sequence
gtctgattttcctggatgga

SEQ ID NO: 559 - DNA, 20 bp, Unknown
  Description of Unknown: target sequence
tgctgatccaaaagtattat

SEQ ID NO: 560 - DNA, 20 bp, Unknown
  Description of Unknown: target sequence
atcagacttaatagtccgcg

SEQ ID NO: 561 - DNA, 20 bp, Unknown
  Description of Unknown: target sequence
tgcattcaagcacaatggca

SEQ ID NO: 562 - DNA, 20 bp, Unknown
  Description of Unknown: target sequence
tcccagagcccacaatagat

SEQ ID NO: 563 - DNA, 20 bp, Unknown
  Description of Unknown: target sequence
tcagcgagagttaatgattc

SEQ ID NO: 564 - DNA, 20 bp, Unknown
  Description of Unknown: target sequence
gtgtgaaacgcgcctaccat

SEQ ID NO: 565 - DNA, 20 bp, Unknown
  Description of Unknown: target sequence
tcagacttaatagtccgcgt

SEQ ID NO: 566 - DNA, 20 bp, Unknown
  Description of Unknown: target sequence
tctagtgcattcaagcacaa

SEQ ID NO: 567 - DNA, 20 bp, Unknown
  Description of Unknown: target sequence
attccctcaaggggtgccag

SEQ ID NO: 568 - DNA, 20 bp, Unknown
  Description of Unknown: target sequence
aaggcagaagccaccaacac

SEQ ID NO: 569 - DNA, 20 bp, Unknown
  Description of Unknown: target sequence
gaggtttattcctgacccca

SEQ ID NO: 570 - DNA, 20 bp, Unknown
  Description of Unknown: target sequence
tttattcctgaccccaaggc

SEQ ID NO: 571 - DNA, 20 bp, Unknown
  Description of Unknown: target sequence
gtttattcctgaccccaagg

SEQ ID NO: 572 - DNA, 20 bp, Unknown
  Description of Unknown: target sequence
catacaaggagcggtcaaca

SEQ ID NO: 573 - DNA, 20 bp, Unknown
  Description of Unknown: target sequence
aaaaattcatcctgaaagtg

SEQ ID NO: 574 - DNA, 20 bp, Unknown
  Description of Unknown: target sequence
aaatataatagctggcatca

SEQ ID NO: 575 - DNA, 20 bp, Unknown
  Description of Unknown: target sequence
tgacttcaattatgaacgtc

SEQ ID NO: 576 - DNA, 20 bp, Unknown
  Description of Unknown: target sequence
ctagttctgtgtactcaacg

SEQ ID NO: 577 - DNA, 20 bp, Unknown
  Description of Unknown: target sequence
agattaaaaggcaccgaagg

SEQ ID NO: 578 - DNA, 20 bp, Unknown
  Description of Unknown: target sequence
acgagattaaaaggcaccga

SEQ ID NO: 579 - DNA, 20 bp, Unknown
  Description of Unknown: target sequence
ggatgaaacgaatgagaata

SEQ ID NO: 580 - DNA, 20 bp, Unknown
  Description of Unknown: target sequence
aactacaggagaaatataat

SEQ ID NO: 581 - DNA, 20 bp, Unknown
  Description of Unknown: target sequence
tgggaaagaagacaacgaca

SEQ ID NO: 582 - DNA, 20 bp, Unknown
  Description of Unknown: target sequence
gccaataatacttttggatc

SEQ ID NO: 583 - DNA, 20 bp, Unknown
  Description of Unknown: target sequence
cttacgacaggctcgtgaat

SEQ ID NO: 584 - DNA, 20 bp, Unknown
  Description of Unknown: target sequence
gttaaaataggcagaagtct

SEQ ID NO: 585 - DNA, 20 bp, Unknown
  Description of Unknown: target sequence
ttctgttcatatagatccac

SEQ ID NO: 586 - DNA, 20 bp, Unknown
  Description of Unknown: target sequence
agaaatcctgacttacgaca

SEQ ID NO: 587 - DNA, 20 bp, Unknown
  Description of Unknown: target sequence
aacgatgtgggcaagacttc

SEQ ID NO: 588 - DNA, 20 bp, Unknown
  Description of Unknown: target sequence
attccccaaacctgaacacc

SEQ ID NO: 589 - DNA, 20 bp, Unknown
  Description of Unknown: target sequence
cgacaggctcgtgaatggca

SEQ ID NO: 590 - DNA, 20 bp, Unknown
  Description of Unknown: target sequence
acttctgcctattttaactt

SEQ ID NO: 591 - DNA, 20 bp, Unknown
  Description of Unknown: target sequence
gcgacgagattaggctgtta

SEQ ID NO: 592 - DNA, 20 bp, Unknown
  Description of Unknown: target sequence
tggatcacggaaaaggcaga

SEQ ID NO: 593 - DNA, 20 bp, Unknown
  Description of Unknown: target sequence
gacacagacacaacaggcac

SEQ ID NO: 594 - DNA, 20 bp, Unknown
  Description of Unknown: target sequence
gggaagaattcacagtgacg

SEQ ID NO: 595 - DNA, 20 bp, Unknown
  Description of Unknown: target sequence
gcaccaacaaacacggctta

SEQ ID NO: 596 - DNA, 20 bp, Unknown
  Description of Unknown: target sequence
tatagattctagtgcattca

SEQ ID NO: 597 - DNA, 20 bp, Unknown
  Description of Unknown: target sequence
tcatgatcaaaagtgtgaaa

SEQ ID NO: 598 - DNA, 20 bp, Unknown
  Description of Unknown: target sequence
atgatcaaaagtgtgaaacg

SEQ ID NO: 599 - DNA, 20 bp, Unknown
  Description of Unknown: target sequence
aatgaatggatcacggaaaa

SEQ ID NO: 600 - DNA, 20 bp, Unknown
  Description of Unknown: target sequence
ccaattattccctcaagggg

SEQ ID NO: 601 - DNA, 20 bp, Unknown
  Description of Unknown: target sequence
cagacttaatagtccgcgtg

SEQ ID NO: 602 - DNA, 20 bp, Unknown
  Description of Unknown: target sequence
tctgacgtcaatgctgccat

SEQ ID NO: 603 - DNA, 20 bp, Unknown
  Description of Unknown: target sequence
gcataacagcctaatctcgt

SEQ ID NO: 604 - DNA, 20 bp, Unknown
  Description of Unknown: target sequence
tttttccgacagcactgact

SEQ ID NO: 605 - DNA, 20 bp, Unknown
  Description of Unknown: target sequence
tttccgtgatccattcattc

SEQ ID NO: 606 - DNA, 20 bp, Unknown
  Description of Unknown: target sequence
tttgacaaagcccggatcag

SEQ ID NO: 607 - DNA, 20 bp, Unknown
  Description of Unknown: target sequence
gcccagatgagtttagtgtc

SEQ ID NO: 608 - DNA, 20 bp, Unknown
  Description of Unknown: target sequence
gctgaactgatagtcaacgt

SEQ ID NO: 609 - DNA, 20 bp, Unknown
  Description of Unknown: target sequence
acacttttgatcatgatgcc

SEQ ID NO: 610 - DNA, 20 bp, Unknown
  Description of Unknown: target sequence
gaaaatcagacttaatagtc

SEQ ID NO: 611 - DNA, 20 bp, Unknown
  Description of Unknown: target sequence
gcagacactaaactcatctg

SEQ ID NO: 612 - DNA, 20 bp, Unknown
  Description of Unknown: target sequence
ggaccaggagggcaagtcag

SEQ ID NO: 613 - DNA, 20 bp, Unknown
  Description of Unknown: target sequence
gctgatccaaaagtattatt

SEQ ID NO: 614 - DNA, 20 bp, Unknown
  Description of Unknown: target sequence
acatccactggcagtacaga

SEQ ID NO: 615 - DNA, 20 bp, Unknown
  Description of Unknown: target sequence
cactggcagtacagaagcag

SEQ ID NO: 616 - DNA, 20 bp, Unknown
  Description of Unknown: target sequence
aggcagaagccaccaacacc

SEQ ID NO: 617 - DNA, 20 bp, Unknown
  Description of Unknown: target sequence
aggtttattcctgaccccaa

SEQ ID NO: 618 - DNA, 20 bp, Unknown
  Description of Unknown: target sequence
ccaagcttttccttgttgac

SEQ ID NO: 619 - DNA, 20 bp, Unknown
  Description of Unknown: target sequence
ttagtgtctgcacatccact

SEQ ID NO: 620 - DNA, 20 bp, Unknown
  Description of Unknown: target sequence
ccactagctttccaaacggt

SEQ ID NO: 621 - DNA, 20 bp, Unknown
  Description of Unknown: target sequence
cctcaaggggtgccagggga

SEQ ID NO: 622 - DNA, 20 bp, Unknown
  Description of Unknown: target sequence
tgtgaaacgcgcctaccatc

SEQ ID NO: 623 - DNA, 20 bp, Unknown
  Description of Unknown: target sequence
ctagtgcattcaagcacaat

SEQ ID NO: 624 - DNA, 20 bp, Unknown
  Description of Unknown: target sequence
ccgcgtgggcgacgagatta

SEQ ID NO: 625 - DNA, 20 bp, Unknown
  Description of Unknown: target sequence
ttattcctgaccccaaggcg

SEQ ID NO: 626 - DNA, 20 bp, Unknown
  Description of Unknown: target sequence
actccagaatcattaactct

SEQ ID NO: 627 - DNA, 20 bp, Unknown
  Description of Unknown: target sequence
ttcatctaacgagattaaaa

SEQ ID NO: 628 - DNA, 20 bp, Unknown
  Description of Unknown: target sequence
acaggagaaatataatagct

SEQ ID NO: 629 - DNA, 20 bp, Unknown
  Description of Unknown: target sequence
tcaggatgaatttttccgac

SEQ ID NO: 630 - DNA, 20 bp, Unknown
  Description of Unknown: target sequence
gacttcaattatgaacgtca

SEQ ID NO: 631 - DNA, 20 bp, Unknown
  Description of Unknown: target sequence
aggagcggtcaacaaggaaa

SEQ ID NO: 632 - DNA, 20 bp, Unknown
  Description of Unknown: target sequence
gattaaaaggcaccgaagga

SEQ ID NO: 633 - DNA, 20 bp, Unknown
  Description of Unknown: target sequence
aaaattcatcctgaaagtga

SEQ ID NO: 634 - DNA, 57 bp, Artificial Sequence
  Description of Artificial Sequence: Synthetic primer
  modified_base (34)..(37): a, c, t, g, unknown or other
acactctttccctacacgacgctcttccgatctnnnnccagccccatctgtcaaact

SEQ ID NO: 635 - DNA, 54 bp, Artificial Sequence
  Description of Artificial Sequence: Synthetic primer
tggagttcagacgtgtgctcttccgatcttgaatggattccttggaaacaatga

SEQ ID NO: 636 - DNA, 57 bp, Artificial Sequence
  Description of Artificial Sequence: Synthetic primer
  modified_base (34)..(37): a, c, t, g, unknown or other
acactctttccctacacgacgctcttccgatctnnnntgagggagagccgtgtagtt

SEQ ID NO: 637 - DNA, 49 bp, Artificial Sequence
  Description of Artificial Sequence: Synthetic primer
tggagttcagacgtgtgctcttccgatctgcctctcaaagtgctgggat

SEQ ID NO: 638 - DNA, 57 bp, Artificial Sequence
  Description of Artificial Sequence: Synthetic primer
  modified_base (34)..(37): a, c, t, g, unknown or other
acactctttccctacacgacgctcttccgatctnnnnccatcaggctctcagctcag

SEQ ID NO: 639 - DNA, 48 bp, Artificial Sequence
  Description of Artificial Sequence: Synthetic primer
tggagttcagacgtgtgctcttccgatctctcgtgggtttgtggttgc

SEQ ID NO: 640 - DNA, 57 bp, Artificial Sequence
  Description of Artificial Sequence: Synthetic primer
  modified_base (34)..(37): a, c, t, g, unknown or other
acactctttccctacacgacgctcttccgatctnnnngcccattccctctttagcca

SEQ ID NO: 641 - DNA, 49 bp, Artificial Sequence
  Description of Artificial Sequence: Synthetic primer
tggagttcagacgtgtgctcttccgatctgagccgttccctctttgcta

SEQ ID NO: 642 - DNA, 57 bp, Artificial Sequence
  Description of Artificial Sequence: Synthetic primer
  modified_base (34)..(37): a, c, t, g, unknown or other
acactctttccctacacgacgctcttccgatctnnnnaacctgtgtgacacttggca

SEQ ID NO: 643 - DNA, 49 bp, Artificial Sequence
  Description of Artificial Sequence: Synthetic primer
tggagttcagacgtgtgctcttccgatctgtctggcccaagatcacaca

SEQ ID NO: 644 - DNA, 56 bp, Artificial Sequence
  Description of Artificial Sequence: Synthetic primer
  modified_base (34)..(36): a, c, t, g, unknown or other
acactctttccctacacgacgctcttccgatctnnncacggataaagacgctggga

SEQ ID NO: 645 - DNA, 47 bp, Artificial Sequence
  Description of Artificial Sequence: Synthetic primer
tggagttcagacgtgtgctcttccgatctggggtcccaggtgctgac

SEQ ID NO: 646 - DNA, 56 bp, Artificial Sequence
  Description of Artificial Sequence: Synthetic primer
  modified_base (34)..(36): a, c, t, g, unknown or other
acactctttccctacacgacgctcttccgatctnnnttgattgtctcctttgccgc

SEQ ID NO: 647 - DNA, 53 bp, Artificial Sequence
  Description of Artificial Sequence: Synthetic primer
tggagttcagacgtgtgctcttccgatcttgacccagtgtttgatagatcagt

SEQ ID NO: 648 - DNA, 56 bp, Artificial Sequence
  Description of Artificial Sequence: Synthetic primer
  modified_base (34)..(36): a, c, t, g, unknown or other
acactctttccctacacgacgctcttccgatctnnncaccccttcagtccatgctt

SEQ ID NO: 649 - DNA, 49 bp, Artificial Sequence
  Description of Artificial Sequence: Synthetic primer
tggagttcagacgtgtgctcttccgatcttctgatggggaggaacgagt

SEQ ID NO: 650 - DNA, 57 bp, Artificial Sequence
  Description of Artificial Sequence: Synthetic primer
  modified_base (34)..(37): a, c, t, g, unknown or other
acactctttccctacacgacgctcttccgatctnnnncagctcagcctgagtgttga

SEQ ID NO: 651 - DNA, 49 bp, Artificial Sequence
  Description of Artificial Sequence: Synthetic primer
tggagttcagacgtgtgctcttccgatctgcccaccctagtcattggag

SEQ ID NO: 652 - DNA, 57 bp, Artificial Sequence
  Description of Artificial Sequence: Synthetic primer
  modified_base (34)..(37): a, c, t, g, unknown or other
acactctttccctacacgacgctcttccgatctnnnngtcagagggacacactgtgg

SEQ ID NO: 653 - DNA, 49 bp, Artificial Sequence
  Description of Artificial Sequence: Synthetic primer
tggagttcagacgtgtgctcttccgatctcacactcactcacccacaca

SEQ ID NO: 654 - DNA, 57 bp, Artificial Sequence
  Description of Artificial Sequence: Synthetic primer
  modified_base (34)..(37): a, c, t, g, unknown or other
acactctttccctacacgacgctcttccgatctnnnntgtgtgggtgagtgagtgtg

SEQ ID NO: 655 - DNA, 49 bp, Artificial Sequence
  Description of Artificial Sequence: Synthetic primer
tggagttcagacgtgtgctcttccgatctcaccaaggttcacagcctga

SEQ ID NO: 656 - DNA, 57 bp, Artificial Sequence
  Description of Artificial Sequence: Synthetic primer
  modified_base (34)..(37): a, c, t, g, unknown or other
acactctttccctacacgacgctcttccgatctnnnnttgtctctgcctgtagctgc

SEQ ID NO: 657 - DNA, 49 bp, Artificial Sequence
  Description of Artificial Sequence: Synthetic primer
tggagttcagacgtgtgctcttccgatctcgctctgggcttcatcttca

SEQ ID NO: 658 - DNA, 57 bp, Artificial Sequence
  Description of Artificial Sequence: Synthetic primer
  modified_base (34)..(37): a, c, t, g, unknown or other
acactctttccctacacgacgctcttccgatctnnnntgggattatgggtgtgagcc

SEQ ID NO: 659 - DNA, 49 bp, Artificial Sequence
  Description of Artificial Sequence: Synthetic primer
tggagttcagacgtgtgctcttccgatcttgccttcctcctctctctcc

SEQ ID NO: 660 - DNA, 57 bp, Artificial Sequence
  Description of Artificial Sequence: Synthetic primer
  modified_base (34)..(37): a, c, t, g, unknown or other
acactctttccctacacgacgctcttccgatctnnnntgcagaccagattcggagaa

SEQ ID NO: 661 - DNA, 49 bp, Artificial Sequence
  Description of Artificial Sequence: Synthetic primer
tggagttcagacgtgtgctcttccgatctgttcagtttccagggggtcc

SEQ ID NO: 662 - DNA, 57 bp, Artificial Sequence
  Description of Artificial Sequence: Synthetic primer
  modified_base (34)..(37): a, c, t, g, unknown or other
acactctttccctacacgacgctcttccgatctnnnntccgcacagccttagttcaa

SEQ ID NO: 663 - DNA, 49 bp, Artificial Sequence
  Description of Artificial Sequence: Synthetic primer
tggagttcagacgtgtgctcttccgatctaacttgaagagacggcagca

SEQ ID NO: 664 - DNA, 57 bp, Artificial Sequence
  Description of Artificial Sequence: Synthetic primer
  modified_base (34)..(37): a, c, t, g, unknown or other
acactctttccctacacgacgctcttccgatctnnnncccccagctacagaaaggtc

SEQ ID NO: 665 - DNA, 49 bp, Artificial Sequence
  Description of Artificial Sequence: Synthetic primer
tggagttcagacgtgtgctcttccgatctatttccaccgcaaaatggcc

SEQ ID NO: 666 - DNA, 57 bp, Artificial Sequence
  Description of Artificial Sequence: Synthetic primer
  modified_base (34)..(37): a, c, t, g, unknown or other
acactctttccctacacgacgctcttccgatctnnnntcacttcagcccaggagtat

SEQ ID NO: 667 - DNA, 51 bp, Artificial Sequence
  Description of Artificial Sequence: Synthetic primer
tggagttcagacgtgtgctcttccgatcttgtgtatggtgagaggtaggga

SEQ ID NO: 668 - DNA, 57 bp, Artificial Sequence
  Description of Artificial Sequence: Synthetic primer
  modified_base (34)..(37): a, c, t, g, unknown or other
acactctttccctacacgacgctcttccgatctnnnngtctgaggtcacacagtggg

SEQ ID NO: 669 - DNA, 49 bp, Artificial Sequence
  Description of Artificial Sequence: Synthetic primer
tggagttcagacgtgtgctcttccgatctctgagagcagggaccacatc

SEQ ID NO: 670 - DNA, 57 bp, Artificial Sequence
  Description of Artificial Sequence: Synthetic primer
  modified_base (34)..(37): a, c, t, g, unknown or other
acactctttccctacacgacgctcttccgatctnnnngggaggtggagagaggatgt

SEQ ID NO: 671 - DNA, 54 bp, Artificial Sequence
  Description of Artificial Sequence: Synthetic primer
tggagttcagacgtgtgctcttccgatctactcttcctgaggtctaggaacccg

SEQ ID NO: 672 - DNA, 57 bp, Artificial Sequence
  Description of Artificial Sequence: Synthetic primer
  modified_base (34)..(37): a, c, t, g, unknown or other
acactctttccctacacgacgctcttccgatctnnnnccctgttcctaaagcccacc

SEQ ID NO: 673 - DNA, 53 bp, Artificial Sequence
  Description of Artificial Sequence: Synthetic primer
tggagttcagacgtgtgctcttccgatctactctctggttctgtttgtggcca

SEQ ID NO: 674 - DNA, 60 bp, Artificial Sequence
  Description of Artificial Sequence: Synthetic primer
  modified_base (34)..(37): a, c, t, g, unknown or other
acactctttccctacacgacgctcttccgatctnnnnatttgatggagttggacatggcc

SEQ ID NO: 675 - DNA, 46 bp, Artificial Sequence
  Description of Artificial Sequence: Synthetic primer
tggagttcagacgtgtgctctccagctacttgttcttgagtgaagg

SEQ ID NO: 676 - DNA, 59 bp, Artificial Sequence
  Description of Artificial Sequence: Synthetic primer
  modified_base (34)..(37): a, c, t, g, unknown or other
acactctttccctacacgacgctcttccgatctnnnntggctttccaaatcagtgggtc

SEQ ID NO: 677 - DNA, 52 bp, Artificial Sequence
  Description of Artificial Sequence: Synthetic primer
tggagttcagacgtgtgctcttccgatctctcataagcttagaccaacaagc

SEQ ID NO: 678 - DNA, 58 bp, Artificial Sequence
  Description of Artificial Sequence: Synthetic primer
  modified_base (34)..(37): a, c, t, g, unknown or other
acactctttccctacacgacgctcttccgatctnnnnctggttgaccaatctgtggtg

SEQ ID NO: 679 - DNA, 41 bp, Artificial Sequence
  Description of Artificial Sequence: Synthetic primer
tggagttcagacgtgtgctctctgcgtctggatcaggtacg

SEQ ID NO: 680 - DNA, 58 bp, Artificial Sequence
  Description of Artificial Sequence: Synthetic primer
  modified_base (34)..(37): a, c, t, g, unknown or other
acactctttccctacacgacgctcttccgatctnnnngtgtggagagtgagtaagcca

SEQ ID NO: 681 - DNA, 50 bp, Artificial Sequence
  Description of Artificial Sequence: Synthetic primer
tggagttcagacgtgtgctcttccgatctacggtaggatgatttcaggca

SEQ ID NO: 682 - DNA, 58 bp, Artificial Sequence
  Description of Artificial Sequence: Synthetic primer
  modified_base (34)..(37): a, c, t, g, unknown or other
acactctttccctacacgacgctcttccgatctnnnncacaaagcagtgtagctcagg

SEQ ID NO: 683 - DNA, 54 bp, Artificial Sequence
  Description of Artificial Sequence: Synthetic primer
tggagttcagacgtgtgctcttccgatcttttttggtactcgagtgttattcag

SEQ ID NO: 684 - DNA, 57 bp, Artificial Sequence
  Description of Artificial Sequence: Synthetic primer
  modified_base (34)..(37): a, c, t, g, unknown or other
acactctttccctacacgacgctcttccgatctnnnntcccctgttgacctggagaa

SEQ ID NO: 685 - DNA, 49 bp, Artificial Sequence
  Description of Artificial Sequence: Synthetic primer
tggagttcagacgtgtgctcttccgatctcactgtacttgccctgacca

SEQ ID NO: 686 - DNA, 57 bp, Artificial Sequence
  Description of Artificial Sequence: Synthetic primer
  modified_base (34)..(37): a, c, t, g, unknown or other
acactctttccctacacgacgctcttccgatctnnnnttggtgttgacagggagcaa

SEQ ID NO: 687 - DNA, 49 bp, Artificial Sequence
  Description of Artificial Sequence: Synthetic primer
tggagttcagacgtgtgctcttccgatctctgagatgtgggcagaaggg

SEQ ID NO: 688 - DNA, 57 bp, Artificial Sequence
  Description of Artificial Sequence: Synthetic primer
  modified_base (34)..(37): a, c, t, g, unknown or other
acactctttccctacacgacgctcttccgatctnnnntgagagggaacagaagggct

SEQ ID NO: 689 - DNA, 49 bp, Artificial Sequence
  Description of Artificial Sequence: Synthetic primer
tggagttcagacgtgtgctcttccgatctgtccaaaggcccaagaacct

SEQ ID NO: 690 - DNA, 58 bp, Artificial Sequence
  Description of Artificial Sequence: Synthetic primer
  modified_base (34)..(37): a, c, t, g, unknown or other
acactctttccctacacgacgctcttccgatctnnnntcctagcactttggaaggtcg

SEQ ID NO: 691 - DNA, 51 bp, Artificial Sequence
  Description of Artificial Sequence: Synthetic primer
tggagttcagacgtgtgctcttccgatctgctcatcttaatctgctcagcc

SEQ ID NO: 692 - DNA, 57 bp, Artificial Sequence
  Description of Artificial Sequence: Synthetic primer
  modified_base (34)..(37): a, c, t, g, unknown or other
acactctttccctacacgacgctcttccgatctnnnnaaaggagcagctcttcctgg

SEQ ID NO: 693 - DNA, 49 bp, Artificial Sequence
  Description of Artificial Sequence: Synthetic primer
tggagttcagacgtgtgctcttccgatctgtctgcaccatctcccacaa

SEQ ID NO: 694 - DNA, 57 bp, Artificial Sequence
  Description of Artificial Sequence: Synthetic primer
  modified_base (34)..(37): a, c, t, g, unknown or other
acactctttccctacacgacgctcttccgatctnnnnggcatggcttctgagactca

SEQ ID NO: 695 - DNA, 53 bp, Artificial Sequence
  Description of Artificial Sequence: Synthetic primer
tggagttcagacgtgtgctcttccgatctgtctcccttgcactccctgtcttt

SEQ ID NO: 696 - DNA, 57 bp, Artificial Sequence
  Description of Artificial Sequence: Synthetic primer
  modified_base (34)..(37): a, c, t, g, unknown or other
acactctttccctacacgacgctcttccgatctnnnntttggcaatggaggcattgg

SEQ ID NO: 697 - DNA, 49 bp, Artificial Sequence
  Description of Artificial Sequence: Synthetic primer
tggagttcagacgtgtgctcttccgatctgaagaggctgcccatgagag

SEQ ID NO: 698 - DNA, 57 bp, Artificial Sequence
  Description of Artificial Sequence: Synthetic primer
  modified_base (34)..(37): a, c, t, g, unknown or other
acactctttccctacacgacgctcttccgatctnnnnggtctgaggctcgaatcctg

SEQ ID NO: 699 - DNA, 49 bp, Artificial Sequence
  Description of Artificial Sequence: Synthetic primer
tggagttcagacgtgtgctcttccgatctctgtggcctccatatccctg

SEQ ID NO: 700 - DNA, 57 bp, Artificial Sequence
  Description of Artificial Sequence: Synthetic primer
  modified_base (34)..(37): a, c, t, g, unknown or other
acactctttccctacacgacgctcttccgatctnnnntttccaccagaactcagccc

SEQ ID NO: 701 - DNA, 49 bp, Artificial Sequence
  Description of Artificial Sequence: Synthetic primer
tggagttcagacgtgtgctcttccgatctcctcggttcctccacaacac

SEQ ID NO: 702 - DNA, 57 bp, Artificial Sequence
  Description of Artificial Sequence: Synthetic primer
  modified_base (34)..(37): a, c, t, g, unknown or other
acactctttccctacacgacgctcttccgatctnnnncacgggaaggacaggagaag

SEQ ID NO: 703 - DNA, 49 bp, Artificial Sequence
  Description of Artificial Sequence: Synthetic primer
tggagttcagacgtgtgctcttccgatctgcaggggagggataaagcag

SEQ ID NO: 704 - DNA, 59 bp, Artificial Sequence
  Description of Artificial Sequence: Synthetic primer
  modified_base (34)..(37): a, c, t, g, unknown or other
acactctttccctacacgacgctcttccgatctnnnnggaaacgcccatgcaattagtc

SEQ ID NO: 705 - DNA, 51 bp, Artificial Sequence
  Description of Artificial Sequence: Synthetic primer
tggagttcagacgtgtgctcttccgatctcttgtcaaccagtatcccggtg

SEQ ID NO: 706 - DNA, 61 bp, Artificial Sequence
  Description of Artificial Sequence: Synthetic primer
  modified_base (34)..(37): a, c, t, g, unknown or other
acactctttccctacacgacgctcttccgatctnnnntgaatggattccttggaaacaatg

SEQ ID NO: 707 - DNA, 49 bp, Artificial Sequence
  Description of Artificial Sequence: Synthetic primer
tggagttcagacgtgtgctcttccgatctccagccccatctgtcaaact

SEQ ID NO: 708 - DNA, 49 bp, Artificial Sequence
  Description of Artificial Sequence: Synthetic primer
tggagttcagacgtgtgctcttccgatcttcctttcaacccgaacggag

SEQ ID NO: 709 - DNA, 57 bp, Artificial Sequence
  Description of Artificial Sequence: Synthetic primer
  modified_base (34)..(37): a, c, t, g, unknown or other
acactctttccctacacgacgctcttccgatctnnnngctggtcttctttcccctcc

SEQ ID NO: 710 - DNA, 59 bp, Artificial Sequence
  Description of Artificial Sequence: Synthetic primer
  modified_base (34)..(37): a, c, t, g, unknown or other
acactctttccctacacgacgctcttccgatctnnnngccctgcttctttttctctggt

SEQ ID NO: 711 - DNA, 51 bp, Artificial Sequence
  Description of Artificial Sequence: Synthetic primer
tggagttcagacgtgtgctcttccgatctaccattaacgcagccaacttca

SEQ ID NO: 712 - DNA, 60 bp, Artificial Sequence
  Description of Artificial Sequence: Synthetic primer
acactctttccctacacgacgctcttccgatctcatgaggtctatggacttcaagagcaa

SEQ ID NO: 713 - DNA, 56 bp, Artificial Sequence
  Description of Artificial Sequence: Synthetic primer
tggagttcagacgtgtgctcttccgatctcatcattgaccagagctctgggcagaa

SEQ ID NO: 714 - DNA, 60 bp, Artificial Sequence
  Description of Artificial Sequence: Synthetic primer
acactctttccctacacgacgctcttccgatctgcacttaccagcattacttcctaaacc

SEQ ID NO: 715 - DNA, 55 bp, Artificial Sequence
  Description of Artificial Sequence: Synthetic primer
tggagttcagacgtgtgctcttccgatctatgggctccacttttcagctctgtaa

SEQ ID NO: 716 - DNA, 57 bp, Artificial Sequence
  Description of Artificial Sequence: Synthetic primer
acactctttccctacacgacgctcttccgatctcagttcaggcacatgtaggaggga

SEQ ID NO: 717 - DNA, 56 bp, Artificial Sequence
  Description of Artificial Sequence: Synthetic primer
tggagttcagacgtgtgctcttccgatctaccgcctgcagctgtcggacactggca

SEQ ID NO: 718 - DNA, 56 bp, Artificial Sequence
  Description of Artificial Sequence: Synthetic primer
acactctttccctacacgacgctcttccgatctaaaagatgagtatgcctgccgtg

SEQ ID NO: 719 - DNA, 56 bp, Artificial Sequence
  Description of Artificial Sequence: Synthetic primer
tggagttcagacgtgtgctcttccgatctcagattgtttatatcagatgggatggg

SEQ ID NO: 720 - DNA, 59 bp, Artificial Sequence
  Description of Artificial Sequence: Synthetic primer
acactctttccctacacgacgctcttccgatctatgcaagtttggtcctgagccctccc

SEQ ID NO: 721 - DNA, 53 bp, Artificial Sequence
  Description of Artificial Sequence: Synthetic primer
tggagttcagacgtgtgctcttccgatctgatgtgggttccctgcgctctgca

SEQ ID NO: 722 - DNA, 57 bp, Artificial Sequence
  Description of Artificial Sequence: Synthetic primer
acactctttccctacacgacgctcttccgatctccagggactgagggtggaaggtcc

SEQ ID NO: 723 - DNA, 52 bp, Artificial Sequence
  Description of Artificial Sequence: Synthetic primer
tggagttcagacgtgtgctcttccgatctacctccgcctgagcagtggagaa

SEQ ID NO: 724 - DNA, 27 bp, Artificial Sequence
  Description of Artificial Sequence: Synthetic primer
tcgagctcggtacctaatacgactcac

SEQ ID NO: 725 - DNA, 149 bp, Artificial Sequence
  Description of Artificial Sequence: Synthetic primer
ttttttttttttttttttttttttttttttttttttttttttttttttttttttttttttttttttttttttttttttttttttttttttttttttttttttttttttttttttttttttcttcctactcaggctttattcaaagacca

SEQ ID NO: 726 - DNA, 164 bp, Unknown
  Description of Unknown: CD117 sequence
gcaagtcagtgctgtcggaaaaattcatcctgaaagtgaggccagccttcaaagctgtgcctgttgtgtctgtgtccaaagcaagctatcttcttagggaaggggaagaattcacagtgacgtgcacaataaaagatgtgtctagttctgtgtactcaacgtgg

SEQ ID NO: 727 - protein, 55 aa, Unknown
  Description of Unknown: CD117 sequence
GKSVLSEKFILKVRPAFKAVPVVSVSKASYLLREGEEFTVTCTIKDVSSSVYSTW

SEQ ID NO: 728 - DNA, 24 bp, Unknown
  Description of Unknown: CD117 sequence
gacttacgacaggctcgtgaatgg

SEQ ID NO: 729 - protein, 8 aa, Unknown
  Description of Unknown: CD117 sequence
TYDRLVNG

SEQ ID NO: 730 - DNA, 27 bp, Unknown
  Description of Unknown: CD117 sequence
gaagtgaccaattattccctcaagggg

SEQ ID NO: 731 - protein, 9 aa, Unknown
  Description of Unknown: CD117 sequence
EVTNYSLKG

SEQ ID NO: 732 - DNA, 24 bp, Unknown
  Description of Unknown: CD117 sequence
actacagtatttgtaaacgatgga

SEQ ID NO: 733 - protein, 8 aa, Unknown
  Description of Unknown: CD117 sequence
TTVFVNDG

SEQ ID NO: 734 - DNA, 23 bp, Unknown
  Description of Unknown: CD117 sequence
aagacaacgacacgctggtccgc

SEQ ID NO: 735 - protein, 8 aa, Unknown
  Description of Unknown: CD117 sequence
EDNDTLVR

SEQ ID NO: 736 - DNA, 23 bp, Unknown
  Description of Unknown: CD117 sequence
ggctgttatgcactgatccgggc

SEQ ID NO: 737 - protein, 8 aa, Unknown
  Description of Unknown: CD117 sequence
RLLCTDPG
